(19) United States
(12) Patent Application Publication
(10) Pub. No.: US 2022/0049002 A1
(43) Pub. Date: Feb. 17, 2022

(54) Anti-IL4 Receptor Antibodies for Veterinary Use

(71) Applicant: Kindred Biosciences, Inc., Burlingame, CA (US)

(72) Inventors: Shyr Jiann Li, Millbrae, CA (US); Lam Nguyen, Union City, CA (US); Richard Chin, San Francisco, CA (US); Hangjun Zhan, Foster City, CA (US)

(73) Assignee: Kindred Biosciences, Inc., Burlingame, CA (US)

(21) Appl. No.: 17/274,746

(22) PCT Filed: Sep. 14, 2019
(86) PCT No.: PCT/US2019/051201

§ 371 Date: Mar. 9, 2021

Related U.S. Application Data
(60) Provisional application No. 62/731,633, filed on Sep. 14, 2018.

(51) Int. Cl. C07K 16/28; A61K 45/06; A61K 39/395; G01N 33/68

(52) U.S. Cl. CPC C07K 16/2866; A61K 45/06; A61K 39/3955; G01N 33/6869; G01N 2333/7155; C07K 2317/92; C07K 2317/24; C07K 2317/31; C07K 2317/76; C07K 2317/34

(57) ABSTRACT

Provided are various embodiments relating to anti-IL4R antibodies that bind to canine IL4R. In various embodiments, such anti-IL4R antibodies can be used in methods to treat IL4/IL13-induced conditions, such as atopic dermatitis, allergic dermatitis, pruritus, asthma, psoriasis, scleroderma and eczema, in companion animals, such as canines and felines. Also provided are various embodiments relating to variant IgG Fc polypeptides and variant light chain constant regions of companion animal species for the preparation of antibodies or bispecific antibodies.

### FIELD

[0001] This invention relates to isolated anti-IL4 receptor (IL4R) antibodies, for example, binding to canine or feline IL4R and reducing binding with IL4 or IL13, and methods of using the same, for example, treating IL4-induced and/or IL13-induced conditions or reducing IL4 or IL13 signaling function in cells, for instance in companion animals, such as canines and felines.

### BACKGROUND

[0002] Interleukin 4 (IL4) is a cytokine that induces naïve T helper cells to differentiate to Th2 cells. IL4 can also stimulate activated B cell and T cell proliferation and induce B cell class switching to IgE. IL13 has similar effect on immune cells as IL4. Both cytokines are associated with allergies.

[0003] IL4 receptor is known as IL4Ralpha or IL4R. IL4R can pair with a common gamma chain receptor and specifically bind IL4. IL4R can also pair with IL13Ra1 and together they can bind either IL4 or IL13. Thus, blocking binding sites on IL4R can potentially reduce binding of IL4 and/or IL13 and reduce signaling effect of these two cytokines.

[0004] Companion animals, such as cats, dogs, and horses, suffer from many skin diseases similar to human skin diseases, including atopic dermatitis and allergic conditions. There remains a need, therefore, for methods and compounds that can be used specifically to block companion animal IL4 or/and IL13 for treating IL4-induced and/or IL13-induced conditions and for reducing IL4/IL13 signaling.

### SUMMARY

[0005] Embodiment 1. An isolated antibody that binds to canine IL4R or feline IL4R, wherein the antibody binds to an epitope comprising the amino acid sequence of LX₁₀FMGSENX₁₁T (SEQ ID NO: 85), wherein X₁₀ is D or N and X₁₁ is H or R.

[0006] Embodiment 2. An isolated antibody that binds to canine IL4R or feline IL4R, wherein the antibody binds to an epitope comprising the amino acid sequence of RLSYQLX₁₀FMGSENX₁₁TCVPEN (SEQ ID NO: 86), wherein X₁₀ is D or N and X₁₁ is H or R.

[0007] Embodiment 3. The isolated antibody of embodiment 2, wherein the antibody binds to an epitope comprising the amino acid sequence of LX₁₀FMGSENX₁₁T (SEQ ID NO: 85), wherein X₁₀ is D or N and X₁₁ is H or R.

[0008] Embodiment 4. The isolated antibody of any one of the preceding embodiments, wherein the antibody binds to an epitope comprising the amino acid sequence of SEQ ID NO: 88 or SEQ ID NO: 91.

[0009] Embodiment 5. The isolated antibody of any one of the preceding embodiments, wherein the antibody binds to an epitope comprising the amino acid sequence of SEQ ID NO: 89 or SEQ ID NO: 92.

[0010] Embodiment 6. The isolated antibody of any one of the preceding embodiments, wherein the antibody binds to an epitope comprising the amino acid sequence of SMX₁₂X₁₃DDX₁₄VEADVYQLX₁₅LWAGX₁₆Q (SEQ ID NO: 87), wherein X₁₂ is P or L, X₁₃ is I or M, X₁₄ is A or F, X₁₅ is D or H, and X₁₆ is Q or T.

[0011] Embodiment 7. An isolated antibody that binds to canine IL4R or feline IL4R, wherein the antibody binds to an epitope comprising the amino acid sequence of SMX₁₂X₁₃DDX₁₄VEADVYQLX₁₅LWAGX₁₆Q (SEQ ID NO: 87), wherein X₁₂ is P or L, X₁₃ is I or M, X₁₄ is A or F, X₁₅ is D or H, and X₁₆ is Q or T.

[0012] Embodiment 8. The isolated antibody of any one of the preceding embodiments, wherein the antibody binds to an epitope comprising the amino acid sequence of SEQ ID NO: 90 or SEQ ID NO: 93.

[0013] Embodiment 9. The isolated antibody of any one of the preceding embodiments, wherein the antibody binds to canine IL4R or feline IL4R with a dissociation constant (Kd) of less than 5×10⁻⁶ M, less than 1×10⁻⁶ M, less than 5×10⁻⁷ M, less than 1×10⁻⁷ M, less than 5×10⁻⁸ M, less than 1×10⁻⁸ M, less than 5×10⁻⁹ M, less than 1×10⁻⁹ M, less than 5×10⁻¹⁰ M, less than 1×10⁻¹⁰ M, less than 5×10⁻¹¹ M, less than 1×10⁻¹¹ M, less than 5×10⁻¹² M, or less than 1×10⁻¹² M, as measured by biolayer interferometry.

[0014] Embodiment 10. The antibody of any one of the preceding embodiments, wherein the antibody binds to canine IL4R or feline IL4R as determined by immunoblot analysis or biolayer interferometry.

[0015] Embodiment 11. The isolated antibody of any one of the preceding embodiments, wherein the antibody reduces binding of a canine and/or feline IL4 polypeptide and/or a canine and/or feline IL13 polypeptide to canine IL4R and/or feline IL4R, as measured by biolayer interferometry.

[0016] Embodiment 12. The isolated antibody of any one of the preceding embodiments, wherein the antibody competes with monoclonal Clone B or Clone I antibody in binding to canine IL4R or feline IL4R.

[0017] Embodiment 13. The isolated antibody of any one of the preceding embodiments, wherein the antibody is a monoclonal antibody.

[0018] Embodiment 14. The isolated antibody of any one of the preceding embodiments, wherein the antibody is a canine, a caninized, a feline, a felinized, or a chimeric antibody.

[0019] Embodiment 15. The isolated antibody of any one of the preceding embodiments, wherein the antibody is a chimeric antibody comprising one or more murine variable heavy chain framework regions or one or more murine variable light chain framework regions.

[0020] Embodiment 16. The isolated antibody of any one of the preceding embodiments, comprising a heavy chain comprising:

[0021] a) a CDR-H1 sequence having at least 85%, at least 90%, at least 95%, at least 98%, or 100% sequence identity to the amino acid sequence of GYTFTSYVMH (SEQ ID NO: 1);

[0022] b) a CDR-H2 sequence having at least 85%, at least 90%, at least 95%, at least 98%, or 100% sequence identity to the amino acid sequence of YINPX₁NDGTFYNGX₂X₃X₄G (SEQ ID NO: 2), wherein X₁ is K or A, X₂ K or A, X₃ is F or V, and X₄ is K or Q, or YINPX₁NDGT (SEQ ID NO: 268), wherein X₁ is K or A; and

[0023] c) a CDR-H3 sequence having at least 85%, at least 90%, at least 95%, at least 98%, or 100% sequence identity to the amino acid sequence of FX₅YGX₆AY (SEQ ID NO: 3), wherein X₅ is N or Y, and X₆ s I or F.

[0024] Embodiment 17. The isolated antibody of any one of the preceding embodiments, comprising a heavy chain comprising:

[0025] a) a CDR-H1 sequence having at least 85%, at least 90%, at least 95%, at least 98%, or 100% sequence identity to the amino acid sequence of SEQ ID NO: 1;

[0026] b) a CDR-H2 sequence having at least 85%, at least 90%, at least 95%, at least 98%, or 100% sequence identity to the amino acid sequence of SEQ ID NO: 8, SEQ ID NO: 269, SEQ ID NO: 30, SEQ ID NO: 271, or SEQ ID NO: 273; and

[0027] c) a CDR-H3 sequence having at least 85%, at least 90%, at least 95%, at least 98%, or 100% sequence identity to the amino acid sequence of SEQ ID NO: 9 or SEQ ID NO: 31.

[0028] Embodiment 18. The isolated antibody of any one of the preceding embodiments, comprising a heavy chain comprising:

[0029] a) a CDR-H1 comprising the amino acid sequence of SEQ ID NO: 1;

[0030] b) a CDR-H2 comprising the amino acid sequence of SEQ ID NO: 8, SEQ ID NO: 269, SEQ ID NO: 30, SEQ ID NO: 271, or SEQ ID NO: 272; and

[0031] c) a CDR-H3 comprising the amino acid sequence of SEQ ID NO: 9 or SEQ ID NO: 31.

[0032] Embodiment 19. The isolated antibody of any one of the preceding embodiments, comprising a light chain comprising:

[0033] a) a CDR-L1 sequence having at least 85%, at least 90%, at least 95%, at least 98%, or 100% sequence identity to the amino acid sequence of RASQEISGYLS (SEQ ID NO: 4);

[0034] b) a CDR-L2 sequence having at least 85%, at least 90%, at least 95%, at least 98%, or 100% sequence identity to the amino acid sequence of AASX₇X₈DX₉ (SEQ ID NO: 5), wherein X₇ is T or N, X₈ is R or L, and X₉ is S or T; and

[0035] c) a CDR-L3 sequence having at least 85%, at least 90%, at least 95%, at least 98%, or 100% sequence identity to the amino acid sequence of VQYASYPWT (SEQ ID NO: 6).

[0036] Embodiment 20. The isolated antibody of any one of the preceding embodiments, comprising a light chain comprising:

[0037] a) a CDR-L1 sequence having at least 85%, at least 90%, at least 95%, at least 98%, or 100% sequence identity to the amino acid sequence of SEQ ID NO: 4;

[0038] b) a CDR-L2 sequence having at least 85%, at least 90%, at least 95%, at least 98%, or 100% sequence identity to the amino acid sequence of SEQ ID NO: 15 or SEQ ID NO: 37; and

[0039] c) a CDR-L3 sequence having at least 85%, at least 90%, at least 95%, at least 98%, or 100% sequence identity to the amino acid sequence of SEQ ID NO: 6.

[0040] Embodiment 21. The isolated antibody of any one of the preceding embodiments, comprising a light chain comprising:

[0041] a) a CDR-L1 comprising the amino acid sequence of SEQ ID NO: 4;

[0042] b) a CDR-L2 comprising the amino acid sequence of SEQ ID NO: 15 or SEQ ID NO: 37; and

[0043] c) a CDR-L3 comprising the amino acid sequence of SEQ ID NO: 6.

[0044] Embodiment 22. The antibody of any one of embodiments 16 to 21, further comprising one or more of (a) a variable region heavy chain framework 1 (HC-FR1) sequence of SEQ ID NO: 10 or SEQ ID NO: 32; (b) a HC-FR2 sequence of SEQ ID NO: 11 or SEQ ID NO: 33; (c) a HC-FR3 sequence of SEQ ID NO: 12, SEQ ID NO: 270, SEQ ID NO: 34, or SEQ ID NO: 273; (d) a HC-FR4 sequence of SEQ ID NO: 13 or SEQ ID NO: 35; (e) a variable region light chain framework 1 (LC-FR1) sequence of SEQ ID NO: 17 or SEQ ID NO: 39; (f) an LC-FR2 sequence of SEQ ID NO: 18 or SEQ ID NO: 40; (g) an LC-FR3 sequence of SEQ ID NO: 19 or SEQ ID NO: 41; or (h) an LC-FR4 sequence of SEQ ID NO: 20 or SEQ ID NO: 42.

[0045] Embodiment 23. The antibody of any one of the preceding embodiments, wherein the antibody comprises:

[0046] a. (i) a variable heavy chain sequence having at least 85%, at least 90%, at least 95%, at least 98%, or 100% sequence identity to the amino acid sequence of SEQ ID NO: 21 or SEQ ID NO: 43; (ii) a variable light chain sequence having at least 85%, at least 90%, at least 95%, at least 98%, or 100% sequence identity to the amino acid sequence of SEQ ID NO: 22 or SEQ ID NO: 44; or (iii) a variable heavy chain sequence as in (i) and a variable light chain sequence as in (ii); or

[0047] b. (i) a variable heavy chain sequence having at least 85%, at least 90%, at least 95%, at least 98%, or 100% sequence identity to the amino acid sequence of SEQ ID NO: 59, SEQ ID NO: 60, SEQ ID NO: 63, SEQ ID NO: 64, or SEQ ID NO: 274; (ii) a variable light chain sequence having at least 85%, at least 90%, at least 95%, at least 98%, or 100% sequence identity to the amino acid sequence of SEQ ID NO: 61, SEQ ID NO: 62, SEQ ID NO: 65, SEQ ID NO: 66, or SEQ ID NO: 275; or (iii) a variable heavy chain sequence as in (i) and a variable light chain sequence as in (ii); or

[0048] c. (i) a variable heavy chain sequence having at least 85%, at least 90%, at least 95%, at least 98%, or 100% sequence identity to the amino acid sequence of SEQ ID NO: 67 or SEQ ID NO: 69; (ii) a variable light chain sequence having at least 85%, at least 90%, at least 95%, at least 98%, or 100% sequence identity to the amino acid sequence of SEQ ID NO: 68 or SEQ ID NO: 70; or (iii) a variable heavy chain sequence as in (i) and a variable light chain sequence as in (ii).

[0049] Embodiment 24. The antibody of any one of the preceding embodiments, wherein the antibody comprises a variable heavy chain sequence comprising the amino acid sequence of SEQ ID NO: 21, SEQ ID NO: 43, SEQ ID NO: 59, SEQ ID NO: 60, SEQ ID NO: 63, SEQ ID NO: 64, SEQ ID NO: 274, SEQ ID NO: 67, or SEQ ID NO: 69.

[0050] Embodiment 25. The antibody of any one of the preceding embodiments, wherein the antibody comprises a variable light chain sequence comprising the amino acid sequence of SEQ ID NO: 22, SEQ ID NO: 44, SEQ ID NO: 61, SEQ ID NO: 62, SEQ ID NO: 65, SEQ ID NO: 66, SEQ ID NO: 275, SEQ ID NO: 68, or SEQ ID NO: 70.

[0051] Embodiment 26. The antibody of any one of the preceding embodiments, wherein the antibody comprises:

[0052] a) a variable heavy chain sequence comprising the amino acid sequence of SEQ ID NO: 21 or SEQ ID NO: 43, and a variable light chain sequence comprising the amino acid sequence of SEQ ID NO: 22 or SEQ ID NO: 44;

[0053] b) a variable heavy chain sequence comprising the amino acid sequence of SEQ ID NO: 59, SEQ ID NO: 60, SEQ ID NO: 63, SEQ ID NO: 64, or SEQ ID NO: 274 and a variable light chain sequence comprising the amino acid sequence of SEQ ID NO: 61, SEQ ID NO: 62, SEQ ID NO: 65, SEQ ID NO: 66, SEQ ID NO: 275; or

[0054] c) a variable heavy chain sequence comprising the amino acid sequence of SEQ ID NO: 67 or SEQ ID NO: 69 and a variable light chain sequence comprising the amino acid sequence of SEQ ID NO: 68 or SEQ ID NO: 70.

[0055] Embodiment 27. An isolated antibody that binds to canine IL4R or feline IL4R, wherein the antibody binds to an epitope comprising the amino acid sequence of SEQ ID NO: 354.

[0056] Embodiment 28. The isolated antibody of embodiment 27, wherein the antibody binds to canine IL4R or feline IL4R with a dissociation constant (Kd) of less than 5×10-6 M, less than 1×10-6 M, less than 5×10-7 M, less than 1×10-7 M, less than 5×10-8 M, less than 1×10-8 M, less than 5×10-9 M, less than 1×10-9 M, less than 5×10-10 M, less than 1×10-10 M, less than 5×10 11 M, less than 1×10 11 M, less than 5×10-12 M, or less than 1×10-12 M, as measured by biolayer interferometry.

[0057] Embodiment 29. The antibody of embodiment 27 or embodiment 28, wherein the antibody binds to canine IL4R or feline IL4R as determined by immunoblot analysis or biolayer interferometry.

[0058] Embodiment 30. The isolated antibody of any one of embodiments 27 to 29, wherein the antibody reduces binding of a canine and/or feline IL4 polypeptide and/or a canine and/or feline IL13 polypeptide to canine IL4R and/or feline IL4R, as measured by biolayer interferometry.

[0059] Embodiment 31. The isolated antibody of any one of embodiments 27 to 30, wherein the antibody competes with monoclonal M3 antibody in binding to canine IL4R or feline IL4R.

[0060] Embodiment 32. The isolated antibody of any one of embodiments 27 to 31, wherein the antibody is a monoclonal antibody.

[0061] Embodiment 33. The isolated antibody of any one of embodiments 27 to 32, wherein the antibody is a canine, a caninized, a feline, a felinized, or a chimeric antibody.

[0062] Embodiment 34. The isolated antibody of any one of embodiments 27 to 33, wherein the antibody is a chimeric antibody comprising one or more murine variable heavy chain framework regions or one or more murine variable light chain framework regions.

[0063] Embodiment 35. The isolated antibody of any one of embodiments 27 to 34, comprising a heavy chain comprising:

[0064] a) a CDR-H1 sequence having at least 85%, at least 90%, at least 95%, at least 98%, or 100% sequence identity to the amino acid sequence of SEQ ID NO: 278;

[0065] b) a CDR-H2 sequence having at least 85%, at least 90%, at least 95%, at least 98%, or 100% sequence identity to the amino acid sequence of SEQ ID NO: 279; and

[0066] c) a CDR-H3 sequence having at least 85%, at least 90%, at least 95%, at least 98%, or 100% sequence identity to the amino acid sequence of SEQ ID NO: 280.

[0067] Embodiment 36. The isolated antibody of any one of embodiments 27 to 35, comprising a light chain comprising:

[0068] a) a CDR-L1 sequence having at least 85%, at least 90%, at least 95%, at least 98%, or 100% sequence identity to the amino acid sequence of SEQ ID NO: 285;

[0069] b) a CDR-L2 sequence having at least 85%, at least 90%, at least 95%, at least 98%, or 100% sequence identity to the amino acid sequence of SEQ ID NO: 286; and

[0070] c) a CDR-L3 sequence having at least 85%, at least 90%, at least 95%, at least 98%, or 100% sequence identity to the amino acid sequence of SEQ ID NO: 287.

[0071] Embodiment 37. The isolated antibody of any one of embodiments 27 to 36, further comprising one or more of (a) a variable region heavy chain framework 1 (HC FR1) sequence of SEQ ID NO: 281; (b) a HC-FR2 sequence of SEQ ID NO: 282; (c) a HC-FR3 sequence of SEQ ID NO: 283; (d) a HC-FR4 sequence of SEQ ID NO: 284; (e) a variable region light chain framework 1 (LC-FR1) sequence of SEQ ID NO: 288; (f) an LC FR2 sequence of SEQ ID NO: 289; (g) an LC FR3 sequence of SEQ ID NO: 290; or (h) an LC-FR4 sequence of SEQ ID NO: 291.

[0072] Embodiment 38. The isolated antibody of any one of embodiments 27 to 37, wherein the antibody comprises:

[0073] a. (i) a variable heavy chain sequence having at least 85%, at least 90%, at least 95%, at least 98%, or 100% sequence identity to the amino acid sequence of SEQ ID NO: 292; (ii) a variable light chain sequence having at least 85%, at least 90%, at least 95%, at least 98%, or 100% sequence identity to the amino acid sequence of SEQ ID NO: 293; or (iii) a variable heavy chain sequence as in (i) and a variable light chain sequence as in (ii); or b. (i) a variable heavy chain sequence having at least 85%, at least 90%, at least 95%, at least 98%, or 100% sequence identity to the amino acid sequence of SEQ ID NO: 342 or SEQ ID NO: 343; (ii) a variable light chain sequence having at least 85%, at least 90%, at least 95%, at least 98%, or 100% sequence identity to the amino acid sequence of SEQ ID NO: 344; or (iii) a variable heavy chain sequence as in (i) and a variable light chain sequence as in (ii).

[0074] Embodiment 39. The isolated antibody of any one of embodiments 27 to 38, wherein the antibody comprises a variable heavy chain sequence comprising the amino acid sequence of SEQ ID NO: 292, SEQ ID NO: 342, or SEQ ID NO: 343.

[0075] Embodiment 40. The isolated antibody of any one of embodiments 27 to 39, wherein the antibody comprises a variable light chain sequence comprising the amino acid sequence of SEQ ID NO: 293 or SEQ ID NO: 344.

[0076] Embodiment 41. The isolated antibody of any one of embodiments 27 to 40, wherein the antibody comprises:

[0077] a) a variable heavy chain sequence comprising the amino acid sequence of SEQ ID NO: 292, and a variable light chain sequence comprising the amino acid sequence of SEQ ID NO: 293; and/or

[0078] b) a variable heavy chain sequence comprising the amino acid sequence of SEQ ID NO: 342 or SEQ ID NO: 343, and a variable light chain sequence comprising the amino acid sequence of SEQ ID NO: 344.

[0079] Embodiment 42. An isolated antibody comprising:

[0080] a) a variable heavy chain sequence comprising the amino acid sequence of SEQ ID NO: 292, and a variable light chain sequence comprising the amino acid sequence of SEQ ID NO: 293; or

[0081] b) a variable heavy chain sequence comprising the amino acid sequence of SEQ ID NO: 342 or SEQ ID NO: 343, and a variable light chain sequence comprising the amino acid sequence of SEQ ID NO: 344.

[0082] Embodiment 43. An isolated antibody that binds to canine IL4R or feline IL4R, wherein the antibody binds to an epitope comprising the amino acid sequence of SEQ ID NO: 355 and/or an epitope comprising the amino acid sequence of SEQ ID NO: 356.

[0083] Embodiment 44. The isolated antibody of embodiment 43, wherein the antibody binds to canine IL4R or feline IL4R with a dissociation constant (Kd) of less than 5×10-6 M, less than 1×10-6 M, less than 5×10-7 M, less than 1×10-7 M, less than 5×10-8 M, less than 1×10-8 M, less than 5×10-9 M, less than 1×10-9 M, less than 5×10-10 M, less than 1×10-10 M, less than 5×10 11 M, less than 1×10 11 M, less than 5×10-12 M, or less than 1×10-12 M, as measured by biolayer interferometry.

[0084] Embodiment 45. The antibody of embodiment 43 or embodiment 44, wherein the antibody binds to canine IL4R or feline IL4R as determined by immunoblot analysis or biolayer interferometry.

[0085] Embodiment 46. The isolated antibody of any one of embodiments 43 to 45, wherein the antibody reduces binding of a canine and/or feline IL4 polypeptide and/or a canine and/or feline IL13 polypeptide to canine IL4R and/or feline IL4R, as measured by biolayer interferometry.

[0086] Embodiment 47. The isolated antibody of any one of embodiments 43 to 46, wherein the antibody competes with monoclonal M8 antibody in binding to canine IL4R or feline IL4R.

[0087] Embodiment 48. The isolated antibody of any one of embodiments 43 to 47, wherein the antibody is a monoclonal antibody.

[0088] Embodiment 49. The isolated antibody of any one of embodiments 43 to 48, wherein the antibody is a canine, a caninized, a feline, a felinized, or a chimeric antibody.

[0089] Embodiment 50. The isolated antibody of any one of embodiments 43 to 49, wherein the antibody is a chimeric antibody comprising one or more murine variable heavy chain framework regions or one or more murine variable light chain framework regions.

[0090] Embodiment 51. The isolated antibody of any one of embodiments 43 to 50, comprising a heavy chain comprising:

[0091] a) a CDR-H1 sequence having at least 85%, at least 90%, at least 95%, at least 98%, or 100% sequence identity to the amino acid sequence of SEQ ID NO: 310;

[0092] b) a CDR-H2 sequence having at least 85%, at least 90%, at least 95%, at least 98%, or 100% sequence identity to the amino acid sequence of SEQ ID NO: 311; and

[0093] c) a CDR-H3 sequence having at least 85%, at least 90%, at least 95%, at least 98%, or 100% sequence identity to the amino acid sequence of SEQ ID NO: 312.

[0094] Embodiment 52. The isolated antibody of any one of embodiments 43 to 51, comprising a light chain comprising:

[0095] a) a CDR-L1 sequence having at least 85%, at least 90%, at least 95%, at least 98%, or 100% sequence identity to the amino acid sequence of SEQ ID NO: 317;

[0096] b) a CDR-L2 sequence having at least 85%, at least 90%, at least 95%, at least 98%, or 100% sequence identity to the amino acid sequence of SEQ ID NO: 318; and

[0097] c) a CDR-L3 sequence having at least 85%, at least 90%, at least 95%, at least 98%, or 100% sequence identity to the amino acid sequence of SEQ ID NO: 319.

[0098] Embodiment 53. The isolated antibody of any one of embodiments 43 to 52, further comprising one or more of (a) a variable region heavy chain framework 1 (HC FR1) sequence of SEQ ID NO: 313; (b) a HC-FR2 sequence of SEQ ID NO: 314; (c) a HC-FR3 sequence of SEQ ID NO: 315; (d) a HC-FR4 sequence of SEQ ID NO: 316; (e) a variable region light chain framework 1 (LC-FR1) sequence of SEQ ID NO: 320; (f) an LC FR2 sequence of SEQ ID NO: 321; (g) an LC FR3 sequence of SEQ ID NO: 322; or (h) an LC-FR4 sequence of SEQ ID NO: 323.

[0099] Embodiment 54. The isolated antibody of any one of embodiments 43 to 53, wherein the antibody comprises:

[0100] (a) a variable heavy chain sequence having at least 85%, at least 90%, at least 95%, at least 98%, or 100% sequence identity to the amino acid sequence of SEQ ID NO: 324;

[0101] (b) a variable light chain sequence having at least 85%, at least 90%, at least 95%, at least 98%, or 100% sequence identity to the amino acid sequence of SEQ ID NO: 325; or

[0102] (c) a variable heavy chain sequence as in (a) and a variable light chain sequence as in (b).

[0103] Embodiment 55. The isolated antibody of any one of embodiments 43 to 54, wherein the antibody comprises a variable heavy chain sequence comprising the amino acid sequence of SEQ ID NO: 324.

[0104] Embodiment 56. The isolated antibody of any one of embodiments 43 to 55, wherein the antibody comprises a variable light chain sequence comprising the amino acid sequence of SEQ ID NO: 325.

[0105] Embodiment 57. The isolated antibody of any one of embodiments 43 to 56, wherein the antibody comprises: a variable heavy chain sequence comprising the amino acid sequence of SEQ ID NO: 324, and a variable light chain sequence comprising the amino acid sequence of SEQ ID NO: 325.

[0106] Embodiment 58. An isolated antibody comprising: a variable heavy chain sequence comprising the amino acid sequence of SEQ ID NO: 324, and a variable light chain sequence comprising the amino acid sequence of SEQ ID NO: 325.

[0107] Embodiment 59. An isolated antibody that binds to canine IL4R, wherein the antibody binds to an epitope comprising the amino acid sequence of SEQ ID NO: 357.

[0108] Embodiment 60. The isolated antibody of embodiment 59, wherein the antibody binds to canine IL4R with a dissociation constant (Kd) of less than 5×10-6 M, less than 1×10-6 M, less than 5×10-7 M, less than 1×10-7 M, less than 5×10-8 M, less than 1×10-8 M, less than 5×10-9 M, less than 1×10-9 M, less than 5×10-10 M, less than 1×10-10 M, less than 5×10 11 M, less than 1×10 11 M, less than 5×10-12 M, or less than 1×10-12 M, as measured by biolayer interferometry.

[0109] Embodiment 61. The antibody of embodiment 58 or embodiment 59, wherein the antibody binds to canine IL4R as determined by immunoblot analysis or biolayer interferometry.

[0110] Embodiment 62. The isolated antibody of any one of embodiments 58 to 61, wherein the antibody reduces binding of a canine IL4 polypeptide and/or a canine IL13 polypeptide to canine IL4R, as measured by biolayer interferometry.

[0111] Embodiment 63. The isolated antibody of any one of embodiments 58 to 62, wherein the antibody competes with monoclonal M9 antibody in binding to canine IL4R.

[0112] Embodiment 64. The isolated antibody of any one of embodiments 58 to 63, wherein the antibody is a monoclonal antibody.

[0113] Embodiment 65. The isolated antibody of any one of embodiments 58 to 64, wherein the antibody is a canine, a caninized, a feline, a felinized, or a chimeric antibody.

[0114] Embodiment 66. The isolated antibody of any one of embodiments 58 to 65, wherein the antibody is a chimeric antibody comprising one or more murine variable heavy chain framework regions or one or more murine variable light chain framework regions.

[0115] Embodiment 67. The isolated antibody of any one of embodiments 58 to 66, comprising a heavy chain comprising:

[0116] a) a CDR-H1 sequence having at least 85%, at least 90%, at least 95%, at least 98%, or 100% sequence identity to the amino acid sequence of SEQ ID NO: 326;

[0117] b) a CDR-H2 sequence having at least 85%, at least 90%, at least 95%, at least 98%, or 100% sequence identity to the amino acid sequence of SEQ ID NO: 327; and

[0118] c) a CDR-H3 sequence having at least 85%, at least 90%, at least 95%, at least 98%, or 100% sequence identity to the amino acid sequence of SEQ ID NO: 328.

[0119] Embodiment 68. The isolated antibody of any one of embodiments 58 to 67, comprising a light chain comprising:

[0120] a) a CDR-L1 sequence having at least 85%, at least 90%, at least 95%, at least 98%, or 100% sequence identity to the amino acid sequence of SEQ ID NO: 333;

[0121] b) a CDR-L2 sequence having at least 85%, at least 90%, at least 95%, at least 98%, or 100% sequence identity to the amino acid sequence of SEQ ID NO: 334; and

[0122] c) a CDR-L3 sequence having at least 85%, at least 90%, at least 95%, at least 98%, or 100% sequence identity to the amino acid sequence of SEQ ID NO: 335.

[0123] Embodiment 69. The isolated antibody of any one of embodiments 58 to 68, further comprising one or more of (a) a variable region heavy chain framework 1 (HC FR1) sequence of SEQ ID NO: 329; (b) a HC-FR2 sequence of SEQ ID NO: 330; (c) a HC-FR3 sequence of SEQ ID NO: 331; (d) a HC-FR4 sequence of SEQ ID NO: 332; (e) a variable region light chain framework 1 (LC-FR1) sequence of SEQ ID NO: 336; (f) an LC FR2 sequence of SEQ ID NO: 337; (g) an LC FR3 sequence of SEQ ID NO: 338; or (h) an LC-FR4 sequence of SEQ ID NO: 339.

[0124] Embodiment 70. The isolated antibody of any one of embodiments 58 to 69, wherein the antibody comprises:

[0125] a. (i) a variable heavy chain sequence having at least 85%, at least 90%, at least 95%, at least 98%, or 100% sequence identity to the amino acid sequence of SEQ ID NO: 340; (ii) a variable light chain sequence having at least 85%, at least 90%, at least 95%, at least 98%, or 100% sequence identity to the amino acid sequence of SEQ ID NO: 341; or (iii) a variable heavy chain sequence as in (i) and a variable light chain sequence as in (ii); or

[0126] b. (i) a variable heavy chain sequence having at least 85%, at least 90%, at least 95%, at least 98%, or 100% sequence identity to the amino acid sequence of SEQ ID NO: 345 or SEQ ID NO: 346; (ii) a variable light chain sequence having at least 85%, at least 90%, at least 95%, at least 98%, or 100% sequence identity to the amino acid sequence of SEQ ID NO: 347; or (iii) a variable heavy chain sequence as in (i) and a variable light chain sequence as in (ii).

[0127] Embodiment 71. The isolated antibody of any one of embodiments 58 to 70, wherein the antibody comprises a variable heavy chain sequence comprising the amino acid sequence of SEQ ID NO: 340, SEQ ID NO: 345, or SEQ ID NO: 346.

[0128] Embodiment 72. The isolated antibody of any one of embodiments 58 to 71, wherein the antibody comprises a variable light chain sequence comprising the amino acid sequence of SEQ ID NO: 341 or SEQ ID NO: 347.

[0129] Embodiment 73. The isolated antibody of any one of embodiments 58 to 72, wherein the antibody comprises:

[0130] a) a variable heavy chain sequence comprising the amino acid sequence of SEQ ID NO: 340, and a variable light chain sequence comprising the amino acid sequence of SEQ ID NO: 341; and/or

[0131] b) a variable heavy chain sequence comprising the amino acid sequence of SEQ ID NO: 345 or SEQ ID NO: 346, and a variable light chain sequence comprising the amino acid sequence of SEQ ID NO: 347.

[0132] Embodiment 74. An isolated antibody comprising:

[0133] a) a variable heavy chain sequence comprising the amino acid sequence of SEQ ID NO: 340, and a variable light chain sequence comprising the amino acid sequence of SEQ ID NO: 341; or

[0134] b) a variable heavy chain sequence comprising the amino acid sequence of SEQ ID NO: 345, or SEQ ID NO: 346 and a variable light chain sequence comprising the amino acid sequence of SEQ ID NO: 347.

[0135] Embodiment 75. An isolated antibody that binds to canine IL4R, comprising a heavy chain comprising:

[0136] a) a CDR-H1 sequence having at least 85%, at least 90%, at least 95%, at least 98%, or 100% sequence identity to the amino acid sequence of SEQ ID NO: 294;

[0137] b) a CDR-H2 sequence having at least 85%, at least 90%, at least 95%, at least 98%, or 100% sequence identity to the amino acid sequence of SEQ ID NO: 295; and

[0138] c) a CDR-H3 sequence having at least 85%, at least 90%, at least 95%, at least 98%, or 100% sequence identity to the amino acid sequence of SEQ ID NO: 296.

[0139] Embodiment 76. An isolated antibody that binds to canine IL4R, comprising a light chain comprising:

[0140] a) a CDR-L1 sequence having at least 85%, at least 90%, at least 95%, at least 98%, or 100% sequence identity to the amino acid sequence of SEQ ID NO: 301;

[0141] b) a CDR-L2 sequence having at least 85%, at least 90%, at least 95%, at least 98%, or 100% sequence identity to the amino acid sequence of SEQ ID NO: 302; and

[0142] c) a CDR-L3 sequence having at least 85%, at least 90%, at least 95%, at least 98%, or 100% sequence identity to the amino acid sequence of SEQ ID NO: 303.

[0143] Embodiment 77. The isolated antibody of embodiment 75, comprising a light chain comprising:

[0144] a) a CDR-L1 sequence having at least 85%, at least 90%, at least 95%, at least 98%, or 100% sequence identity to the amino acid sequence of SEQ ID NO: 301;

[0145] b) a CDR-L2 sequence having at least 85%, at least 90%, at least 95%, at least 98%, or 100% sequence identity to the amino acid sequence of SEQ ID NO: 302; and

[0146] c) a CDR-L3 sequence having at least 85%, at least 90%, at least 95%, at least 98%, or 100% sequence identity to the amino acid sequence of SEQ ID NO: 303.

[0147] Embodiment 78. The isolated antibody of any one of embodiments 75 to 77, wherein the antibody binds to canine IL4R with a dissociation constant (Kd) of less than 5×10-6 M, less than 1×10-6 M, less than 5×10-7 M, less than 1×10-7 M, less than 5×10-8 M, less than 1×10-8 M, less than 5×10-9 M, less than 1×10-9 M, less than 5×10-10 M, less than 1×10-10 M, less than 5×10 11 M, less than 1×10 11 M, less than 5×10-12 M, or less than 1×10-12 M, as measured by biolayer interferometry.

[0148] Embodiment 79. The antibody of any one of embodiments 75 to 78, wherein the antibody binds to canine IL4R as determined by immunoblot analysis or biolayer interferometry.

[0149] Embodiment 80. The isolated antibody of any one of embodiments 75 to 79, wherein the antibody reduces binding of a canine IL4 polypeptide and/or a canine IL13 polypeptide to canine IL4R, as measured by biolayer interferometry.

[0150] Embodiment 81. The isolated antibody of any one of embodiments 75 to 80, wherein the antibody competes with monoclonal M5 antibody in binding to canine IL4R.

[0151] Embodiment 82. The isolated antibody of any one of embodiments 75 to 81, wherein the antibody is a monoclonal antibody.

[0152] Embodiment 83. The isolated antibody of any one of embodiments 75 to 82, wherein the antibody is a canine, a caninized, a feline, a felinized, or a chimeric antibody.

[0153] Embodiment 84. The isolated antibody of any one of embodiments 75 to 83, wherein the antibody is a chimeric antibody comprising one or more murine variable heavy chain framework regions or one or more murine variable light chain framework regions.

[0154] Embodiment 85. The isolated antibody of any one of embodiments 75 to 84, further comprising one or more of (a) a variable region heavy chain framework 1 (HC FR1) sequence of SEQ ID NO: 297; (b) a HC-FR2 sequence of SEQ ID NO: 298; (c) a HC-FR3 sequence of SEQ ID NO: 299; (d) a HC-FR4 sequence of SEQ ID NO: 300; (e) a variable region light chain framework 1 (LC-FR1) sequence of SEQ ID NO: 304; (f) an LC FR2 sequence of SEQ ID NO: 305; (g) an LC FR3 sequence of SEQ ID NO: 306; or (h) an LC-FR4 sequence of SEQ ID NO: 307.

[0155] Embodiment 86. The isolated antibody of any one of embodiments 75 to 85, wherein the antibody comprises:

[0156] (a) a variable heavy chain sequence having at least 85%, at least 90%, at least 95%, at least 98%, or 100% sequence identity to the amino acid sequence of SEQ ID NO: 308;

[0157] (b) a variable light chain sequence having at least 85%, at least 90%, at least 95%, at least 98%, or 100% sequence identity to the amino acid sequence of SEQ ID NO: 309; or

[0158] (c) a variable heavy chain sequence as in (a) and a variable light chain sequence as in (b).

[0159] Embodiment 87. The isolated antibody of any one of embodiments 75 to 86, wherein the antibody comprises a variable heavy chain sequence comprising the amino acid sequence of SEQ ID NO: 308.

[0160] Embodiment 88. The isolated antibody of any one of embodiments 75 to 87, wherein the antibody comprises a variable light chain sequence comprising the amino acid sequence of SEQ ID NO: 309.

[0161] Embodiment 89. The isolated antibody of any one of embodiments 75 to 88, wherein the antibody comprises: a variable heavy chain sequence comprising the amino acid sequence of SEQ ID NO: 308, and a variable light chain sequence comprising the amino acid sequence of SEQ ID NO: 309.

[0162] Embodiment 90. An isolated antibody comprising: a variable heavy chain sequence comprising the amino acid sequence of SEQ ID NO: 308, and a variable light chain sequence comprising the amino acid sequence of SEQ ID NO: 309.

[0163] Embodiment 91. The antibody of any one of the preceding embodiments, wherein the antibody comprises a wild-type or a variant canine or feline IgG Fc polypeptide.

[0164] Embodiment 92. The antibody of embodiment 91, wherein the IgG Fc polypeptide is a wild-type or variant canine IgG-A Fc polypeptide; a wild-type or variant canine IgG-B Fc polypeptide; a wild-type or variant IgG-C Fc polypeptide; a wild-type or variant IgG-D Fc polypeptide; a wild-type or variant feline IgG1a Fc polypeptide; a wild-type or variant feline IgG1b Fc polypeptide; or a wild-type or variant feline IgG2 Fc polypeptide.

[0165] Embodiment 93. The antibody of embodiment 91 or embodiment 92, wherein the variant IgG Fc polypeptide comprises at least one amino acid modification relative to a wild-type IgG Fc polypeptide, wherein the variant IgG Fc polypeptide has increased binding affinity to Protein A relative to the wild-type IgG Fc polypeptide; reduced binding affinity to C1q relative to the wild-type IgG Fc polypeptide; and/or reduced binding affinity to CD16 relative to the wild-type IgG Fc polypeptide.

[0166] Embodiment 94. The antibody of any one of embodiments 91 to 93, wherein the variant IgG Fc polypeptide comprises at least one amino acid modification to a hinge region relative to a wild-type IgG Fc polypeptide, wherein the variant IgG Fc polypeptide has increased recombinant production and/or increased hinge disulfide formation relative to the wild-type IgG Fc polypeptide, as determined by SDS-PAGE analysis under reducing and/or nonreducing conditions.

[0167] Embodiment 95. The antibody of any one of embodiments 91 to 94, wherein the variant IgG Fc polypeptide comprises:

[0168] a) at least one amino acid substitution at a position corresponding to position 21, 23, 25, 80, 205, and/or 207 of SEQ ID NO: 162;

[0169] b) at least one amino acid substitution at a position corresponding to position 5, 38, 39, 94, 97, and/or 98 of SEQ ID NO: 163;

[0170] c) at least one amino acid substitution at a position corresponding to position 5, 21, 23, 24, 38, 39, 93, 97, and/or 98 of SEQ ID NO: 165;

[0171] d) at least one amino acid substitution at a position corresponding to position 21, 23, 25, 80, and/or 207 of SEQ ID NO: 167;

[0172] e) at least one amino acid substitution at a position corresponding to position 16 and/or 198 of SEQ ID NO: 203, SEQ ID NO: 204, SEQ ID NO: 205, or SEQ ID NO: 206; and/or

[0173] f) at least one amino acid substitution at a position corresponding to position 14 and/or 16 of SEQ ID NO: 207.

[0174] Embodiment 96. The antibody of any one of embodiments 91 to 95, wherein the variant IgG Fc polypeptide comprises:

[0175] a) at least one amino acid substitution at position 21, 23, 25, 80, 205, and/or 207 of SEQ ID NO: 162;

[0176] b) at least one amino acid substitution at position 5, 38, 39, 94, 97, and/or 98 of SEQ ID NO: 163;

[0177] c) at least one amino acid substitution at position 5, 21, 23, 24, 38, 39, 93, 97, and/or 98 of SEQ ID NO: 164;

[0178] d) at least one amino acid substation at position 21, 23, 25, 80, and/or 207 of SEQ ID NO: 165;

[0179] e) at least one amino acid substitution at position 16 and/or 198 of SEQ ID NO: 203, SEQ ID NO: 204, SEQ ID NO: 205, or SEQ ID NO: 206; and/or

[0180] f) at least one amino acid substitution at position 14 and/or 16 of SEQ ID NO: 207.

[0181] Embodiment 97. The antibody of any one of embodiments 91 to 96, wherein the variant IgG Fc polypeptide comprises:

[0182] a) a threonine at a position corresponding to position 21 of SEQ ID NO: 162, a leucine at a position corresponding to position 23 of SEQ ID NO: 162, an alanine at a position corresponding to position 25 of SEQ ID NO: 162, a glycine at a position corresponding to position 80 of SEQ ID NO: 162, an alanine at a position corresponding to position 205 of SEQ ID NO: 162, and/or a histidine at a position corresponding to position 207 of SEQ ID NO: 162;

[0183] b) a proline at a position corresponding to position 5 of SEQ ID NO: 163, a glycine at a position corresponding to position 38 of SEQ ID NO: 163, an arginine at a position corresponding to position 39 of SEQ ID NO: 163, an arginine at a position corresponding to position 93 of SEQ ID NO: 163, an isoleucine at a position corresponding to position 97 of SEQ ID NO: 163, and/or a glycine at a position corresponding to position 98 of SEQ ID NO: 163;

[0184] c) a proline at a position corresponding to position 5 of SEQ ID NO: 164, a threonine at a position corresponding to position 21 of SEQ ID NO: 164, a leucine at a position corresponding to position 23 of SEQ ID NO: 164, an isoleucine at a position corresponding to position 24 of SEQ ID NO: 164, a glycine at a position corresponding to position 38 of SEQ ID NO: 164, an arginine at a position corresponding to position 39 of SEQ ID NO: 164, an arginine at a position corresponding to position 93 of SEQ ID NO: 164, an isoleucine at a position corresponding to position 97 of SEQ ID NO: 164, and/or a glycine at a position corresponding to position 98 of SEQ ID NO: 164;

[0185] d) a threonine at a position corresponding to position 21 of SEQ ID NO: 165, a leucine at a position corresponding to position 23 of SEQ ID NO: 165, an alanine at a position corresponding to position 25 of SEQ ID NO: 165, a glycine at a position corresponding to position 80 of SEQ ID NO: 165, and/or a histidine at a position corresponding to position 207 of SEQ ID NO: 165;

[0186] e) a proline at a position corresponding to position 16 of SEQ ID NO: 203, SEQ ID NO: 204, SEQ ID NO: 205, or SEQ ID NO: 206 and/or an alanine at a position corresponding to position 198 of S SEQ ID NO: 203, SEQ ID NO: 204, SEQ ID NO: 205, or SEQ ID NO: 206; and/or

[0187] f) a cysteine at a position corresponding to position 14 of SEQ ID NO: 207 and/or a proline at a position corresponding to position 16 of SEQ ID NO: 207.

[0188] Embodiment 98. The antibody of any one of embodiments 91 to 97, wherein the variant IgG Fc polypeptide comprises:

[0189] a) a threonine at position 21 of SEQ ID NO: 162, a leucine at position 23 of SEQ ID NO: 162, an alanine at position 25 of SEQ ID NO: 162, a glycine at position 80 of SEQ ID NO: 162, an alanine at position 205 of SEQ ID NO: 162, and/or a histidine at position 207 of SEQ ID NO: 162;

[0190] b) a proline at position 5 of SEQ ID NO: 163, a glycine at position 38 of SEQ ID NO: 163, an arginine at position 39 of SEQ ID NO: 163, an arginine at position 93 of SEQ ID NO: 163, an isoleucine at position 97 of SEQ ID NO: 163, and/or a glycine at position 98 of SEQ ID NO: 163;

[0191] c) a proline at position 5 of SEQ ID NO: 164, a threonine at position 21 of SEQ ID NO: 164, a leucine at position 23 of SEQ ID NO: 164, an isoleucine at position 24 of SEQ ID NO: 164, a glycine at position 38 of SEQ ID NO: 164, an arginine at position 39 of SEQ ID NO: 164, an arginine at position 93 of SEQ ID NO: 164, an isoleucine at position 97 of SEQ ID NO: 164, and/or a glycine at position 98 of SEQ ID NO: 164;

[0192] d) a threonine at position 21 of SEQ ID NO: 165, a leucine at position 23 of SEQ ID NO: 165, an alanine at position 25 of SEQ ID NO: 165, a glycine at position 80 of SEQ ID NO: 165, and/or a histidine at position 207 of SEQ ID NO: 165;

[0193] e) a proline at position 16 of SEQ ID NO: 203, SEQ ID NO: 204, SEQ ID NO: 205, or SEQ ID NO: 206 and/or an alanine at position 198 of SEQ ID NO: 203, SEQ ID NO: 204, SEQ ID NO: 205, or SEQ ID NO: 206; and/or

[0194] f) a cysteine at position 14 of SEQ ID NO: 207 and/or a proline at position 16 of SEQ ID NO: 207.

[0195] Embodiment 99. The antibody of any one of embodiments 91 to 98, wherein the variant IgG Fc polypeptide comprises a CH1 region comprising at least one amino acid modification relative to a wild-type canine or feline IgG CH1 region, wherein the variant IgG Fc polypeptide comprises:

[0196] a) at least one amino acid substitution at a position corresponding to position 24 and/or position 30 of SEQ ID NO: 227, SEQ ID NO: 228, SEQ ID NO: 229, SEQ ID NO: 230, or SEQ ID NO: 237; or

[0197] b) at least one amino acid substitution at a position corresponding to position 24 and/or position 29 of SEQ ID NO: 238.

[0198] Embodiment 100. An antibody comprising a variant IgG Fc polypeptide comprising a CH1 region comprising at least one amino acid modification relative to a wild-type canine or feline IgG CH1 region, wherein the variant IgG Fc polypeptide comprises:

[0199] a) at least one amino acid substitution at a position corresponding to position 24 and/or position 30 of SEQ ID NO: 227, SEQ ID NO: 228, SEQ ID NO: 229, SEQ ID NO: 230, or SEQ ID NO: 237; or

[0200] b) at least one amino acid substitution at a position corresponding to position 24 and/or position 29 of SEQ ID NO: 238.

[0201] Embodiment 101. The antibody of any one of embodiments 27 to 36, wherein the variant IgG Fc polypeptide comprises a CH1 region comprising at least one amino acid modification relative to a wild-type canine or feline IgG CH1 region, wherein the variant IgG Fc polypeptide comprises:

[0202] a) at least one amino acid substitution at position 24 and/or position 30 of SEQ ID NO: 227, SEQ ID NO: 228, SEQ ID NO: 229, SEQ ID NO: 230, or SEQ ID NO: 237; or

[0203] b) at least one amino acid substitution at position 24 and/or position 29 of SEQ ID NO: 238.

[0204] Embodiment 102. The antibody of any one of embodiments 97 to 101, wherein the variant IgG Fc polypeptide comprises a CH1 region comprising at least one amino acid modification relative to a wild-type canine or feline IgG CH1 region, wherein the variant IgG Fc polypeptide comprises:

[0205] a) a leucine at a position corresponding to position 24 and/or an asparagine at a position corresponding to position 30 of SEQ ID NO: 227, SEQ ID NO: 228, SEQ ID NO: 229, SEQ ID NO: 230, or SEQ ID NO: 237; or

[0206] b) a leucine at a position corresponding to position 24 and/or an asparagine at a position corresponding to position 29 of SEQ ID NO: 238.

[0207] Embodiment 103. The antibody of any one of embodiments 91 to 102, wherein the variant IgG Fc polypeptide comprises a CH1 region comprising at least one amino acid modification relative to a wild-type canine or feline IgG CH1 region, wherein the variant IgG Fc polypeptide comprises:

[0208] a) a leucine at position 24 and/or an asparagine at position 30 of SEQ ID NO: 227, SEQ ID NO: 228, SEQ ID NO: 229, SEQ ID NO: 230, or SEQ ID NO: 237; or

[0209] b) a leucine at position 24 and/or an asparagine at position 29 of SEQ ID NO: 238.

[0210] Embodiment 104. The antibody of any one of the preceding embodiments, wherein the antibody comprises a wild-type or a variant canine or feline light chain constant region.

[0211] Embodiment 105. The antibody of any one of the preceding embodiments, wherein the antibody comprises a wild-type or a variant canine or feline light chain κ constant region.

[0212] Embodiment 106. The antibody of embodiment 104 or embodiment 105, wherein the variant light chain constant region comprises at least one amino acid modification relative to a wild-type canine or feline light chain κ constant region comprising:

[0213] a) at least one amino acid substitution at a position corresponding to position 11 and/or position 22 of SEQ ID NO: 235; or

[0214] b) at least one amino acid substitution at a position corresponding to position 11 and/or position 22 of SEQ ID NO: 241.

[0215] Embodiment 107. An antibody comprising a variant light chain constant region comprises at least one amino acid modification relative to a wild-type canine or feline light chain κ constant region comprising:

[0216] a) at least one amino acid substitution at a position corresponding to position 11 and/or position 22 of SEQ ID NO: 235; or

[0217] b) at least one amino acid substitution at a position corresponding to position 11 and/or position 22 of SEQ ID NO: 241.

[0218] Embodiment 108. The antibody of any one of embodiments 104 to 107, wherein the variant light chain constant region comprises at least one amino acid modification relative to a wild-type feline or canine light chain κ constant region comprising:

[0219] a) an alanine at a position corresponding to position 11 and/or an arginine at a position corresponding to position 22 of SEQ ID NO: 235; or

[0220] b) an alanine at a position corresponding to position 11 and/or an arginine at a position corresponding to position 22 of SEQ ID NO: 241.

[0221] Embodiment 109. The antibody of any one of embodiments 104 to 108, wherein the variant light chain constant region comprises at least one amino acid modification relative to a wild-type feline or canine light chain κ constant region comprising:

[0222] a) an alanine at position 11 and/or an arginine at position 22 of SEQ ID NO: 235; or

[0223] b) an alanine at position 11 and/or an arginine at position 22 of SEQ ID NO: 241.

[0224] Embodiment 110. The antibody of any one of embodiments 104 to 109, wherein the light chain constant region comprises an amino acid sequence of SEQ ID NO: 235, 236, 241, and/or 242.

[0225] Embodiment 111. The antibody of any one of the preceding embodiments, wherein the antibody is a bispecific antibody.

[0226] Embodiment 112. The antibody of any one of the preceding embodiments, wherein the antibody is a bispecific antibody comprising:

[0227] i) a first variant canine IgG Fc polypeptide comprising at least one amino acid modification relative to a first wild-type canine IgG Fc polypeptide and a second variant canine IgG Fc polypeptide comprising at least one amino acid modification relative to a second wild-type canine IgG Fc polypeptide, wherein:
[0228] a) the first variant canine IgG Fc polypeptide comprises an amino acid substitution at a position corresponding to position 138 of SEQ ID NO: 162, position 137 of SEQ ID NO: 163, position 137 of SEQ ID NO: 165, or position 138 of SEQ ID NO: 167, and/or
[0229] b) the second variant canine IgG Fc polypeptide comprises an amino acid substitution at a position corresponding to position 138 and/or position 140 of SEQ ID NO: 162, position 137 and/or position 139 of SEQ ID NO: 163, position 137 and/or position 139 of SEQ ID NO: 165, or position 138 and/or position 140 of SEQ ID NO: 167; or

[0230] ii) a first variant feline IgG Fc polypeptide comprising at least one amino acid modification relative to a first wild-type feline IgG Fc polypeptide and a second variant feline IgG Fc polypeptide comprising at least one amino acid modification relative to a second wild-type feline IgG Fc polypeptide, wherein:
[0231] a) the first variant feline IgG Fc polypeptide comprises an amino acid substitution at a position corresponding to position 154 of SEQ ID NO: 203, SEQ ID NO: 204, SEQ ID NO: 205, SEQ ID NO: 206, or SEQ ID NO: 207, and/or
[0232] b) the second variant feline IgG Fc polypeptide comprises an amino acid substitution at a position corresponding to position 154 and/or position 156 of SEQ ID NO: 203, SEQ ID NO: 204, SEQ ID NO: 205, SEQ ID NO: 206, or SEQ ID NO: 207.

[0233] Embodiment 113. An antibody or a bispecific antibody comprising:

[0234] i) a first variant canine IgG Fc polypeptide comprising at least one amino acid modification relative to a first wild-type canine IgG Fc polypeptide and a second variant canine IgG Fc polypeptide comprising at least one amino acid modification relative to a second wild-type canine IgG Fc polypeptide, wherein:
[0235] a) the first variant canine IgG Fc polypeptide comprises an amino acid substitution at a position corresponding to position 138 of SEQ ID NO: 162, position 137 of SEQ ID NO: 163, position 137 of SEQ ID NO: 165, or position 138 of SEQ ID NO: 167, and/or
[0236] b) the second variant canine IgG Fc polypeptide comprises an amino acid substitution at a position corresponding to position 138 and/or position 140 of SEQ ID NO: 162, position 137 and/or position 139 of SEQ ID NO: 163, position 137 and/or position 139 of SEQ ID NO: 165, or position 138 and/or position 140 of SEQ ID NO: 167;

[0237] ii) a first variant feline IgG Fc polypeptide comprising at least one amino acid modification relative to a first wild-type feline IgG Fc polypeptide and a second variant feline IgG Fc polypeptide comprising at least one amino acid modification relative to a second wild-type feline IgG Fc polypeptide, wherein:
[0238] a) the first variant feline IgG Fc polypeptide comprises an amino acid substitution at a position corresponding to position 154 of SEQ ID NO: 203, SEQ ID NO: 204, SEQ ID NO: 205, SEQ ID NO: 206, or SEQ ID NO: 207, and/or
[0239] b) the second variant feline IgG Fc polypeptide comprises an amino acid substitution at a position corresponding to position 154 and/or position 156 of SEQ ID NO: 203, SEQ ID NO: 204, SEQ ID NO: 205, SEQ ID NO: 206, or SEQ ID NO: 207; or

[0240] iii) a first variant equine IgG Fc polypeptide comprising at least one amino acid modification relative to a first wild-type equine IgG Fc polypeptide and a second variant equine IgG Fc polypeptide comprising at least one amino acid modification relative to a second wild-type equine IgG Fc polypeptide, wherein:
[0241] a) the first variant equine IgG Fc polypeptide comprises an amino acid substitution at a position corresponding to position 130 of SEQ ID NO: 254, SEQ ID NO: 255, SEQ ID NO: 256, SEQ ID NO: 257, SEQ ID NO: 258, SEQ ID NO: 259, or SEQ ID NO: 260, and/or
[0242] b) the second variant equine IgG Fc polypeptide comprises an amino acid substitution at a position corresponding to position 130 and/or position 132 of SEQ ID NO: 254, SEQ ID NO: 255, SEQ ID NO: 256, SEQ ID NO: 257, SEQ ID NO: 258, SEQ ID NO: 259, or SEQ ID NO: 260.

[0243] Embodiment 114. The antibody of embodiment 112 or embodiment 113, wherein:

[0244] a) the first variant canine IgG Fc polypeptide comprises a tryptophan at a position corresponding to position 138 of SEQ ID NO: 162, position 137 of SEQ ID NO: 163, position 137 of SEQ ID NO: 165, or position 138 of SEQ ID NO: 167;

[0245] b) the second variant canine IgG Fc polypeptide comprises a serine at a position corresponding to position 138 and/or an alanine at a position corresponding to position 140 of SEQ ID NO: 162, a serine at a position corresponding to position 137 and/or an alanine at a position corresponding to position 139 of SEQ ID NO: 163, a serine at a position corresponding to position 137 and/or an alanine at a position corresponding to position 139 of SEQ ID NO: 165, or a serine at a position corresponding to position 138 and/or an alanine at a position corresponding to position 140 of SEQ ID NO: 167;

[0246] c) the first variant feline IgG Fc polypeptide comprises a tryptophan at a position corresponding to position 154 of SEQ ID NO: 203, SEQ ID NO: 204, SEQ ID NO: 205, SEQ ID NO: 206, or SEQ ID NO: 207;

[0247] d) the second variant feline IgG Fc polypeptide comprises a serine at a position corresponding to position 154 and/or an alanine at a position corresponding to position 156 of SEQ ID NO: 203, SEQ ID NO: 204, SEQ ID NO: 205, SEQ ID NO: 206, or SEQ ID NO: 207;

[0248] e) the first variant equine IgG Fc polypeptide comprises a tryptophan at a position corresponding to position 130 of SEQ ID NO: 254, SEQ ID NO: 255, SEQ ID NO: 256, SEQ ID NO: 257, SEQ ID NO: 258, SEQ ID NO: 259, or SEQ ID NO: 260; and/or

[0249] f) the second variant equine IgG Fc polypeptide comprises a serine at a position corresponding to position 130 and/or an alanine at a position corresponding to position 132 of SEQ ID NO: 254, SEQ ID NO: 255, SEQ ID NO: 256, SEQ ID NO: 257, SEQ ID NO: 258, SEQ ID NO: 259, or SEQ ID NO: 260.

[0250] Embodiment 115. The antibody of any one of embodiments 112 to 114, wherein:

[0251] a) the first variant canine IgG Fc polypeptide comprises an amino acid substitution at position 138 of SEQ ID NO: 162, position 137 of SEQ ID NO: 163, position 137 of SEQ ID NO: 165, or position 138 of SEQ ID NO: 167;

[0252] b) the second variant canine IgG Fc polypeptide comprises an amino acid substitution at position 138 and/or position 140 of SEQ ID NO: 162, an amino acid substitution at position 137 and/or position 139 of SEQ ID NO: 163, an amino acid substitution at position 137 and/or position 139 of SEQ ID NO: 165, or an amino acid substitution at position 138 and/or position 140 of SEQ ID NO: 167;

[0253] c) the first variant feline IgG Fc polypeptide comprises an amino acid substitution at position 154 of SEQ ID NO: 203, SEQ ID NO: 204, SEQ ID NO: 205, SEQ ID NO: 206, or SEQ ID NO: 207;

[0254] d) the second variant feline IgG Fc polypeptide comprises an amino acid substitution at position 154 and/or position 156 of SEQ ID NO: 203, SEQ ID NO: 204, SEQ ID NO: 205, SEQ ID NO: 206, or SEQ ID NO: 207;

[0255] e) the first variant equine IgG Fc polypeptide comprises an amino acid substitution at position 130 of SEQ ID NO: 254, SEQ ID NO: 255, SEQ ID NO: 256, SEQ ID NO: 257, SEQ ID NO: 258, SEQ ID NO: 259, or SEQ ID NO: 260; and/or

[0256] f) the second variant equine IgG Fc polypeptide comprises an amino acid substitution at position 130 and/or position 132 of SEQ ID NO: 254, SEQ ID NO: 255, SEQ ID NO: 256, SEQ ID NO: 257, SEQ ID NO: 258, SEQ ID NO: 259, or SEQ ID NO: 260.

[0257] Embodiment 116. The antibody of any one of embodiments 112 to 115, wherein:

[0258] a) the first variant canine IgG Fc polypeptide comprises a tryptophan at position 138 of SEQ ID NO: 162, position 137 of SEQ ID NO: 163, position 137 of SEQ ID NO: 165, or position 138 of SEQ ID NO: 167;

[0259] b) the second variant canine IgG Fc polypeptide comprises a serine at position 138 and/or an alanine at position 140 of SEQ ID NO: 162, a serine at position 137 and/or an alanine at position 139 of SEQ ID NO: 163, a serine at position 137 and/or an alanine at position 139 of SEQ ID NO: 165, or a serine at position 138 and/or an alanine at position 140 of SEQ ID NO: 167;

[0260] c) the first variant feline IgG Fc polypeptide comprises a tryptophan at position 154 of SEQ ID NO: 203, SEQ ID NO: 204, SEQ ID NO: 205, SEQ ID NO: 206, or SEQ ID NO: 207;

[0261] d) the second variant feline IgG Fc polypeptide comprises a serine at position 154 and/or an alanine at position 156 of SEQ ID NO: 203, SEQ ID NO: 204, SEQ ID NO: 205, SEQ ID NO: 206, or SEQ ID NO: 207;

[0262] e) the first variant equine IgG Fc polypeptide comprises a tryptophan at position 130 of SEQ ID NO: 254, SEQ ID NO: 255, SEQ ID NO: 256, SEQ ID NO: 257, SEQ ID NO: 258, SEQ ID NO: 259, or SEQ ID NO: 260; and/or

[0263] f) the second variant equine IgG Fc polypeptide comprises a serine at position 130 and/or an alanine at position 132 of SEQ ID NO: 254, SEQ ID NO: 255, SEQ ID NO: 256, SEQ ID NO: 257, SEQ ID NO: 258, SEQ ID NO: 259, or SEQ ID NO: 260.

[0264] Embodiment 117. The antibody of any one of embodiments 112 to 116, wherein the first wild-type IgG Fc polypeptide and the second wild-type IgG Fc polypeptide are from the same IgG subtype.

[0265] Embodiment 118. The antibody of any one of embodiments 112 to 117, wherein the first wild-type IgG Fc polypeptide and the second wild-type IgG Fc polypeptide are from a different IgG subtype.

[0266] Embodiment 119. The antibody of any one of the preceding embodiments, wherein the antibody comprises an IgG Fc polypeptide comprising an amino acid sequence of SEQ ID NO: 162, 163, 164, 165, 166, 167, 168, 169, 170, 171, 172, 173, 174, 175, 176, 177, 178, 179, 180, 181, 182, 183, 184, 185, 186, 187, 188, 189, 190, 191, 192, 193, 194, 195, 196, 197, 198, 199, 200, 201, 202, 203, 204, 205, 206, 207, 208, 209, 210, 211, 212, 213, 214, 215, 216, 217, 218, 219, 220, 221, 222, 223, 224, 225, 226, 227, 228, 229, 230, 231, 232, 233, 234, 237, 238, 239, 240, 254, 255, 256, 257, 258, 259, 260, 261, 262, 263, 264, 265, 266, and/or 267.

[0267] Embodiment 120. The antibody of any one of the preceding embodiments, wherein the antibody comprises:

[0268] a. (i) a heavy chain amino acid sequence of SEQ ID NO: 25 or SEQ ID NO: 47; (ii) a light chain amino acid sequence of SEQ ID NO: 26 or SEQ ID NO: 48; or (iii) a heavy chain amino acid sequence as in (i) and a light chain sequence as in (ii);

[0269] b. (i) a heavy chain amino acid sequence of SEQ ID NO: 51 or SEQ ID NO: 55; (ii) a light chain amino acid sequence of SEQ ID NO: 52 or SEQ ID NO: 56; or (iii) a heavy chain amino acid sequence as in (i) and a light chain sequence as in (ii);

[0270] c. (i) a heavy chain amino acid sequence of SEQ ID NO: 71, SEQ ID NO: 72, SEQ ID NO: 75, SEQ ID NO: 76, or SEQ ID NO: 276; (ii) a light chain amino acid sequence of SEQ ID NO: 73, SEQ ID NO: 74, SEQ ID NO: 77, SEQ ID NO: 78, or SEQ ID NO: 277; or (iii) a heavy chain amino acid sequence as in (i) and a light chain sequence as in (ii);

[0271] d. (i) a heavy chain amino acid sequence of SEQ ID NO: 79, SEQ ID NO: 80, SEQ ID NO: 82, or SEQ ID NO: 83; (ii) a light chain amino acid sequence of SEQ ID NO: 81 or SEQ ID NO: 84; or (iii) a heavy chain amino acid sequence as in (i) and a light chain sequence as in (ii); or

[0272] e. (i) a heavy chain amino acid sequence of SEQ ID NO: 243; (ii) a light chain amino acid sequence of SEQ ID NO: 244; or (iii) a heavy chain amino acid sequence as in (i) and a light chain sequence as in (ii).

[0273] Embodiment 121. The antibody of any one of the preceding embodiments, wherein the antibody is a bispecific antibody that binds to IL4R and one or more antigens selected from IL17, IL31, TNFα, CD20, CD19, CD25, IL4, IL13, IL23, IgE, CD11α, IL6R, α4-Intergrin, IL12, IL1β, or BlyS.

[0274] Embodiment 122. The antibody of any one of the preceding embodiments, wherein the antibody comprises (i) a heavy chain amino acid sequence of SEQ ID NO: 245; (ii) a light chain amino acid sequence of SEQ ID NO: 246; or (iii) a heavy chain amino acid sequence as in (i) and a light chain sequence as in (ii).

[0275] Embodiment 123. The antibody of any one of the preceding embodiments, wherein the antibody is an antibody fragment, such as an Fv, scFv, Fab, Fab′, F(ab′)2, or Fab′-SH fragment.

[0276] Embodiment 124. An isolated nucleic acid encoding the antibody of any one of the preceding embodiments.

[0277] Embodiment 125. A host cell comprising the nucleic acid of embodiment 124.

[0278] Embodiment 126. A host cell that expresses the antibody of any one of embodiment 1 to 123.

[0279] Embodiment 127. A method of producing an antibody comprising culturing the host cell of embodiment 125 or embodiment 126 and isolating the antibody.

[0280] Embodiment 128. A pharmaceutical composition comprising the antibody of any one of embodiments 1 to 123 and a pharmaceutically acceptable carrier.

[0281] Embodiment 129. A method of treating a companion animal species having an IL4/IL13-induced condition, the method comprising administering to the companion animal species a therapeutically effective amount of the antibody of any one of embodiments 1 to 123 or the pharmaceutical composition of embodiment 128.

[0282] Embodiment 130. The method of embodiment 129, wherein the companion animal species is canine, feline, or equine.

[0283] Embodiment 131. The method of embodiment 129 or embodiment 130, wherein the IL4/IL13-induced condition is a pruritic or allergic condition.

[0284] Embodiment 132. The method of any one of embodiments 129 to 131, wherein the IL4/IL13-induced condition is selected from atopic dermatitis, allergic dermatitis, pruritus, asthma, psoriasis, scleroderma, and eczema.

[0285] Embodiment 133. The method of any one of embodiments 129 to 132, wherein the antibody or the pharmaceutical composition is administered parenterally.

[0286] Embodiment 134. The method of any one of embodiments 129 to 133, wherein the antibody or the pharmaceutical composition is administered by an intramuscular route, an intraperitoneal route, an intracerebrospinal route, a subcutaneous route, an intra-arterial route, an intrasynovial route, an intrathecal route, or an inhalation route.

[0287] Embodiment 135. The method of any one of embodiments 129 to 134, wherein the method comprises administering in combination with the antibody or the pharmaceutical composition a Jak inhibitor, a PI3K inhibitor, an ERK inhibitor.

[0288] Embodiment 136. The method of any one of embodiments 129 to 135, wherein the method comprises administering in combination with the antibody or the pharmaceutical composition one or more antibodies selected from an anti-IL17 antibody, an anti-IL31 antibody, an anti-TNFα antibody, an anti-CD20 antibody, an anti-CD19 antibody, an anti-CD25 antibody, an anti-IL4 antibody, an anti-IL13 antibody, an anti-IL23 antibody, an anti-IgE antibody, an anti-CD11α antibody, anti-IL6R antibody, anti-α4-Intergrin antibody, an anti-IL12 antibody, an anti-IL1β antibody, and an anti-BlyS antibody.

[0289] Embodiment 137. A method of reducing IL4 and/or IL13 signaling function in a cell, the method comprising exposing to the cell the antibody of any one of embodiments 1 to 123 or the pharmaceutical composition of embodiment 64 under conditions permissive for binding of the antibody to extracellular IL4 and/or IL13, thereby reducing binding of IL4 and/or IL13 to IL4R receptor and/or reducing IL4 and/or IL13 signaling function by the cell.

[0290] Embodiment 138. The method of embodiment 137, wherein the cell is exposed to the antibody or the pharmaceutical composition ex vivo.

[0291] Embodiment 139. The method of embodiment 138, wherein the cell is exposed to the antibody or the pharmaceutical composition in vivo.

[0292] Embodiment 140. The method of any one of embodiments 137 to 139, wherein the cell is a canine cell, a feline cell, or an equine cell.

[0293] Embodiment 141. The method of any one of embodiments 137 to 140, wherein the antibody reduces IL4 and/or IL13 signaling in the cell, as determined by a reduction in STATE phosphorylation.

[0294] Embodiment 142. The method of any one of embodiments 137 to 141, wherein the cell is a canine DH82 cell.

[0295] Embodiment 143. A method for detecting IL4R in a sample from a companion animal species comprising contacting the sample with the antibody of any one of embodiments 1 to 123 or the pharmaceutical composition of embodiment 128 under conditions permissive for binding of the antibody to IL4R.

[0296] Embodiment 144. The method of embodiment 141, wherein the sample is a biological sample obtained from a canine, a feline, or an equine.

[0297] Embodiment 145. A method of screening for a molecule that inhibits IL4 and/or IL13 signaling function comprising exposing to a canine DH82 cell the molecule and detecting whether there is a reduction in STATE phosphorylation.

[0298] Embodiment 146. The method of embodiment 145, wherein the molecule comprises an anti-IL4R antibody or small molecule antagonist of IL4R.

[0299] Embodiment 147. The method of embodiment 145 or embodiment 146, wherein the molecule comprises an anti-IL13R antibody or small molecule antagonist of IL13R.

[0300] Embodiment 148. The method of any one of embodiments 145 to 147, wherein the molecule comprises an anti-IL4 antibody or small molecule antagonist of IL4.

### BRIEF DESCRIPTION OF THE DRAWINGS

[0301] FIG. 1 is an alignment of heavy and light chain amino acid sequences of Clone B and Clone I mouse monoclonal antibody clones.

[0302] FIG. 2A and FIG. 2B are graphs of canine IL4R competitive epitope binding analyses with Clone B followed by Clone I (FIG. 2A) and with Clone I followed by Clone B.

[0303] FIGS. 3A, 3B, 3C, and 3D are graphs of canine IL4R competitive binding analyses with Clone B or Clone I followed by canine IL4 (FIG. 3A); with Clone B or Clone I followed by canine IL13 (FIG. 3B); with canine IL4 followed by Clone B or Clone I (FIG. 3C); and with canine IL13 followed by Clone B or Clone I (FIG. 3D).

[0304] FIGS. 4A and 4B are immunoblots of feline, equine, murine, human, and canine IL4R ECD polypeptides probed with Clone I (FIG. 4A) and anti-human Fc antibody as a control (FIG. 4B) under non-reducing (−DTT, left panel) and reducing (+DTT, right panel) conditions.

[0305] FIG. 5A is an illustration of canine/human IL4R ECD hybrid polypeptides used for canine IL4R epitope mapping analyses. FIGS. 5B and 5C are immunoblots of canine IL4R ECD, human IL4R ECD, the various canine/human IL4R ECD hybrid polypeptides illustrated in 5A probed with Clone I (FIG. 5B) and anti-human Fc antibody as a control (FIG. 5C).

[0306] FIG. 6A is an illustration of canine/human IL4R ECD hybrid polypeptides used for additional canine IL4R epitope mapping analyses. FIGS. 6B and 6C are immunoblots of canine IL4R ECD, human IL4R ECD, and the various canine/human IL4R ECD hybrid polypeptides illustrated in 6A probed with Clone I (FIG. 6B) and anti-human Fc antibody as a control (FIG. 6C).

[0307] FIG. 7A identifies canine IL4R ECD alanine mutant polypeptides further described in Table 1, which were used for additional canine IL4R epitope mapping analyses.

[0308] FIGS. 7B and 7C are immunoblots of human IL4R ECD, canine IL4R ECD, and the various canine IL4R ECD alanine mutant polypeptides probed with Clone I (FIG. 7B) and anti-human Fc antibody as a control (FIG. 7C).

[0309] FIG. 8 is a three-dimensional model of a complex of canine IL4, canine IL4R ECD, and canine IL13R ECD. A first epitope is identified by the arrow.

[0310] FIG. 9A is an illustration of canine/human IL4R ECD hybrid polypeptides used for canine IL4R epitope mapping analyses. FIG. 9B summarizes western blotting analysis of canine IL4R ECD, human IL4R ECD, and various canine/human IL4R ECD hybrid polypeptides probed with M3, M8, and M9 antibodies.

### DESCRIPTION OF CERTAIN SEQUENCES

[0311] Table 1 provides a listing of certain sequences referenced herein.

TABLE 1
Description of the Sequences

| SEQ ID | | |
|---|---|---|
| NO: | SEQUENCE | DESCRIPTION |
| 1 | GYTFTSYVMH | CDR-H1 |
| 2 | YINPX₁NDGTFYNGX₂X₃X₄G | CDR-H2 |
| | wherein X₁ is K or A, X₂ K or A, X₃ is F | |
| | or V, and X₄ is K or Q | |
| 268 | YINPX₁NDGT | Alternative CDR-H2 |
| | wherein X₁ is K or A | |
| 3 | FX₅YGX₆AY | CDR-H3 |
| | wherein X₅ is N or Y, and X₆ s I or F | |
| 4 | RASQEISGYLS | CDR-L1 |
| 5 | AASX₇X₈DX₉ | CDR-L2 |
| | wherein X₇ is T or N, X₈ is R or L, and | |
| | X₉ is S or T | |
| 6 | VQYASYPWT | CDR-L3 |
| 7 | GYTFTSYVMH | Clone B CDR-H1 |
| 8 | YINPKNDGTFYNGKFKG | Clone B CDR-H2 |
| 269 | YINPKNDGT | Alternative Clone B |
| | | CDR-H2 |
| 9 | FNYGIAY | Clone B CDR-H3 |
| 10 | EVKLEESGPELVKPGASVKMSCKAS | Clone B HC-FR1 |
| 11 | WVKQKPGQGLEWIG | Clone B HC-FR2 |
| 12 | KATLTSDKSSSTAYMELSSLTSEDSAVYYCAA | Clone B HC-FR3 |
| 270 | FYNGKFKGKATLTSDKSSSTAYMELSSLTSEDSAVYYCA | Alternative Clone B |
| | A | HC-FR3 |
| 13 | WGQGTLVTVSS | Clone B HC-FR4 |
| 14 | RASQEISGYLS | Clone B CDR-L1 |
| 15 | AASTLDS | Clone B CDR-L2 |
| 16 | VQYASYPWT | Clone B CDR-L3 |
| 17 | DIVLTQTPSSLSASLGERVSLTCRAS | Clone B LC-FR1 |
| 18 | WLQQKPDGTIKRLIY | Clone B LC-FR2 |
| 19 | GVPKRFSGSRSGSDFSLTISSLESEDFADYYC | Clone B LC-FR3 |
| 20 | FGGGARLEIK | Clone B LC-FR4 |
| 21 | EVKLEESGPELVKPGASVKMSCKASGYTFTSYVMHWVKQ | Clone B variable HC |
| | KPGQGLEWIGYINPKNDGTFYNGKFKGKATLTSDKSSST | |
| | AYMELSSLTSEDSAVYYCAAFNYGIAYWGQGTLVTVSS | |
| 22 | IVLTQTPSSLSASLGERVSLTCRASQEISGYLSWLQQKP | Clone B variable LC |
| | DGTIKRLIYAASTLDSGVPKRFSGSRSGSDFSLTISSLE | |
| | SEDFADYYCVQYASYPWTFGGGARLEIK | |
| 23 | MAVLGLLLCLVTFPSCVLSEVKLEESGPELVKPGASVKM | Clone B variable HC |
| | SCKASGYTFTSYVMHWVKQKPGQGLEWIGYINPKNDGTF | with leader sequence |
| | YNGKFKGKATLTSDKSSSTAYMELSSLISEDSAVYYCAA | |
| | FNYGIAYWGQGTLVTVSS | |
| 24 | METDTLLLWVLLLWVPGSTGIVLTQTPSSLSASLGERVS | Clone B variable LC |
| | LTCRASQEISGYLSWLQQKPDGTIKRLIYAASTLDSGVP | with leader sequence |
| | KRFSGSRSGSDFSLTISSLESEDFADYYCVQYASYPWTF | |
| | GGGARLEIK | |
| 25 | EVKLEESGPELVKPGASVKMSCKASGYTFTSYVMHWVKQ | Clone B HC |
| | KPGQGLEWIGYINPKNDGTFYNGKFKGKATLTSDKSSST | |
| | AYMELSSLTSEDSAVYYCAAFNYGIAYWGQGTLVTVSSA | |
| | KITPPSVYPLAPGSAAQTNSMVTLGCLVKGYFPEPVTVT | |
| | WNSGSLSSGVHTFPAVLQSDLYTLSSSVTVPSSPRPSET | |
| | VTCNVAHPASSTKVDKKIVPRDCGCKPCICTVPEVSSVF | |
| | IFPPKPKDVLTITLTPKVTCVVVDISKDDPEVQFSWFVD | |
| | DVEVHTAQTQPREEQFNSTFRSVSELPIMHQDWLNGKEF | |
| | KCRVNSAAFPAPIEKTISKTKGRPKAPQVYTIPPPKEQM | |
| | AKDKVSLTCMITDFFPEDITVEWQWNGQPAENYKNTQPI | |
| | MNTNGSYFVYSKLNVQKSNWEAGNTFTCSVLHEGLHNHH | |
| | TEKSLSHSPGK | |
| 26 | IVLTQTPSSLSASLGERVSLTCRASQEISGYLSWLQQKP | Clone B LC |
| | DGTIKRLIYAASTLDSGVPKRFSGSRSGSDFSLTISSLE | |
| | SEDFADYYCVQYASYPWTFGGGARLEIKRADAAPTVSIF | |
| | PPSSEQLTSGGASVVCFLNNFYPKDINVKWKIDGSERQN | |
| | GVLNSWTDQDSKDSTYSMSSTLTLTKDEYERHNSYTCEA | |
| | THKTSTSPIVKSFNRNEC | |
| 27 | MAVLGLLLCLVTFPSCVLSEVKLEESGPELVKPGASVKM | Clone B HC with leader |
| | SCKASGYTFTSYVMHWVKQKPGQGLEWIGYINPKNDGTF | sequence |
| | YNGKFKGKATLTSDKSSSTAYMELSSLISEDSAVYYCAA | |
| | FNYGIAYWGQGTLVTVSSAKTTPPSVYPLAPGSAAQTNS | |
| | MVTLGCLVKGYFPEPVTVTWNSGSLSSGVHTFPAVLQSD | |
| | LYTLSSSVTVPSSPRPSETVTCNVAHPASSTKVDKKIVP | |
| | RDCGCKPCICTVPEVSSVFIFPPKPKDVLTITLTPKVTC | |
| | VVVDISKDDPEVQFSWFVDDVEVHTAQTQPREEQFNSTF | |
| | RSVSELPIMHQDWLNGKEFKCRVNSAAFPAPIEKTISKI | |
| | KGRPKAPQVYTIPPPKEQMAKDKVSLTCMITDFFPEDIT | |
| | VEWQWNGQPAENYKNTQPIMNTNGSYFVYSKLNVQKSNW | |
| | EAGNTFTCSVLHEGLHNHHTEKSLSHSPGK | |
| 28 | METDTLLLWVLLLWVPGSTGIVLTQTPSSLSASLGERVS | Clone B LC with leader |
| | LTCRASQEISGYLSWLQQKPDGTIKRLIYAASTLDSGVP | sequence |
| | KRFSGSRSGSDFSLTISSLESEDFADYYCVQYASYPWTF | |
| | GGGARLEIKRADAAPTVSIFPPSSEQLTSGGASVVCFLN | |
| | NFYPKDINVKWKIDGSERQNGVLNSWTDQDSKDSTYSMS | |
| | STLTLTKDEYERHNSYTCEATHKTSTSPIVKSFNRNEC | |
| 29 | GYTFTSYVMH | Clone I CDR-H1 |
| 30 | YINPNNDGTFYNGKFKG | Clone I CDR-H2 |
| 271 | YINPNNDGTFYNGKFQG | Alternative Clone I |
| | | CDR-H2 |
| 272 | YINPNNDGT | Alternative Clone I |
| | | CDR-H2 |
| 31 | FYYGFAY | Clone I CDR-H3 |
| 32 | EVQLQQSGPELVKPGASVKMSCKAS | Clone I HC-FR1 |
| 33 | WVKQKPGQGLEWIG | Clone I HC-FR2 |
| 34 | KATLTSDKSSSTAYMELSSLTSEDSAVYYCAA | Clone I HC-FR3 |
| 273 | FYNGKFKGKATLTSDKSSSTAYMELSSLTSEDSAVYYCA | Alternative Clone I HC- |
| | A | FR3 |
| 35 | WGQGTLVTVSA | Clone I HC-FR4 |
| 36 | RASQEISGYLS | Clone I CDR-L1 |
| 37 | ASILDS | Clone I CDR-L2 |
| 38 | LQYASYPWT | Clone I CDR-L3 |
| 39 | DIVLTQSPSSLSASLGERVSLTCRAS | Clone I LC-FR1 |
| 40 | WLQQKPDGTIKRLIY | Clone I LC-FR2 |
| 41 | GVPKRFSGSRSGSDFSLTISSLESEDFADYYC | Clone I LC-FR3 |
| 42 | FGGGAKLEIK | Clone I LC-FR4 |
| 43 | EVQLQQSGPELVKPGASVKMSCKASGYTFTSYVMHWVKQ | Clone I variable HC |
| | KPGQGLEWIGYINPNNDGTFYNGKFKGKATLTSDKSSST | |
| | AYMELSSLTSEDSAVYYCAAFYYGFAYWGQGTLVTVSA | |
| 44 | DIVLTQSPSSLSASLGERVSLTCRASQEISGYLSWLQQK | Clone I variable LC |
| | PDGTIKRLIYAASTLDSGVPKRFSGSRSGSDFSLTISSL | |
| | ESEDFADYYCLQYASYPWTFGGGAKLEIK | |
| 45 | MAVLGLLLCLVTFPSCVLSEVQLQQSGPELVKPGASVKM | Clone I variable HC |
| | SCKASGYTFTSYVMHWVKQKPGQGLEWIGYINPNNDGTF | with leader sequence |
| | YNGKFKGKATLTSDKSSSTAYMELSSLTSEDSAVYYCAA | |
| | FYYGFAYWGQGTLVTVSA | |
| 46 | METDTLLLWVLLLWVPGSTGDIVLTQSPSSLSASLGERV | Clone I variable LC with |
| | SLTCRASQEISGYLSWLQQKPDGTIKRLIYAASTLDSGV | leader sequence |
| | PKRFSGSRSGSDFSLTISSLESEDFADYYCLQYASYPWT | |
| | FGGGAKLEIK | |
| 47 | EVQLQQSGPELVKPGASVKMSCKASGYTFTSYVMHWVKQ | Clone I HC |
| | KPGQGLEWIGYINPNNDGTFYNGKFKGKATLTSDKSSST | |
| | AYMELSSLTSEDSAVYYCAAFYYGFAYWGQGTLVTVSAA | |
| | KITPPSVYPLAPGSAAQTNSMVTLGCLVKGYFPEPVTVT | |
| | WNSGSLSSGVHTFPAVLQSDLYTLSSSVTVPSSPRPSET | |
| | VTCNVAHPASSTKVDKKIVPRDCGCKPCICTVPEVSSVF | |
| | IFPPKPKDVLTITLTPKVTCVVVDISKDDPEVQFSWFVD | |
| | DVEVHTAQTQPREEQFNSTFRSVSELPIMHQDWLNGKEF | |
| | KCRVNSAAFPAPIEKTISKTKGRPKAPQVYTIPPPKEQM | |
| | AKDKVSLTCMITDFFPEDITVEWQWNGQPAENYKNTQPI | |
| | MNTNGSYFVYSKLNVQKSNWEAGNTFTCSVLHEGLHNHH | |
| | TEKSLSHSPGK | |
| 48 | DIVLTQSPSSLSASLGERVSLTCRASQEISGYLSWLQQK | Clone I LC |
| | PDGTIKRLIYAASTLDSGVPKRFSGSRSGSDFSLTISSL | |
| | ESEDFADYYCLQYASYPWTFGGGAKLEIKRADAAPTVSI | |
| | FPPSSEQLTSGGASVVCFLNNFYPKDINVKWKIDGSERQ | |
| | NGVLNSWTDQDSKDSTYSMSSTLTLTKDEYERHNSYTCE | |
| | ATHKTSTSPIVKSFNRNEC | |
| 49 | MAVLGLLLCLVTFPSCVLSEVQLQQSGPELVKPGASVKM | Clone I HC with leader |
| | SCKASGYTFTSYVMHWVKQKPGQGLEWIGYINPNNDGTF | sequence |
| | YNGKFKGKATLTSDKSSSTAYMELSSLISEDSAVYYCAA | |
| | FYYGFAYWGQGTLVTVSAAKTTPPSVYPLAPGSAAQTNS | |
| | MVTLGCLVKGYFPEPVTVTWNSGSLSSGVHTFPAVLQSD | |
| | LYTLSSSVTVPSSPRPSETVTCNVAHPASSTKVDKKIVP | |
| | RDCGCKPCICTVPEVSSVFIFPPKPKDVLTITLTPKVTC | |
| | VVVDISKDDPEVQFSWFVDDVEVHTAQTQPREEQFNSTF | |
| | RSVSELPIMHQDWLNGKEFKCRVNSAAFPAPIEKTISKI | |
| | KGRPKAPQVYTIPPPKEQMAKDKVSLTCMITDFFPEDIT | |
| | VEWQWNGQPAENYKNTQPIMNTNGSYFVYSKLNVQKSNW | |
| | EAGNTFTCSVLHEGLHNHHTEKSLSHSPGK | |
| 50 | METDTLLLWVLLLWVPGSTGDIVLTQSPSSLSASLGERV | Clone I LC with leader |
| | SLTCRASQEISGYLSWLQQKPDGTIKRLIYAASTLDSGV | sequence |
| | PKRFSGSRSGSDFSLTISSLESEDFADYYCLQYASYPWT | |
| | FGGGAKLEIKRADAAPTVSIFPPSSEQLTSGGASVVCFL | |
| | NNFYPKDINVKWKIDGSERQNGVLNSWTDQDSKDSTYSM | |
| | SSTLTLTKDEYERHNSYTCEATHKTSTSPIVKSFNRNEC | |
| 51 | EVKLEESGPELVKPGASVKMSCKASGYTFTSYVMHWVKQ | Chimeric Clone B |
| | KPGQGLEWIGYINPKNDGTFYNGKFKGKATLTSDKSSST | variable HC and canine |
| | AYMELSSLTSEDSAVYYCAAFNYGIAYWGQGTLVTVSSA | IgG-B |
| | STTAPSVFPLAPSCGSTSGSTVALACLVSGYFPEPVTVS | (Chimeric B HC) |
| | WNSGSLTSGVHTFPSVLQSSGLYSLSSMVTVPSSRWPSE | |
| | TFTCNVAHPASKTKVDKPVPKRENGRVPRPPDCPKCPAP | |
| | EMLGGPSVFIFPPKPKDTLLIARTPEVTCVVVDLDPEDP | |
| | EVQISWFVDGKQMQTAKTQPREEQFNGTYRVVSVLPIGH | |
| | QDWLKGKQFTCKVNNKALPSPIERTISKARGQAHQPSVY | |
| | VLPPSREELSKNTVSLTCLIKDFFPPDIDVEWQSNGQQE | |
| | PESKYRTTPPQLDEDGSYFLYSKLSVDKSRWQRGDTFIC | |
| | AVMHEALHNHYTQESLSHSPGK | |
| 52 | IVLTQTPSSLSASLGERVSLTCRASQEISGYLSWLQQKP | Chimeric Clone B |
| | DGTIKRLIYAASTLDSGVPKRFSGSRSGSDFSLTISSLE | variable LC and canine κ |
| | SEDFADYYCVQYASYPWTFGGGARLEIKRNDAQPAVYLF | light constant region |
| | QPSPDQLHTGSASVVCLLNSFYPKDINVKWKVDGVIQDT | (Chimeric B LC) |
| | GIQESVTEQDKDSTYSLSSTLTMSSTEYLSHELYSCEIT | |
| | HKSLPSTLIKSFQRSECQRVD | |
| 53 | MAVLGLLLCLVTFPSCVLSEVKLEESGPELVKPGASVKM | Chimeric Clone B |
| | SCKASGYTFTSYVMHWVKQKPGQGLEWIGYINPKNDGTF | variable HC and canine |
| | YNGKFKGKATLTSDKSSSTAYMELSSLTSEDSAVYYCAA | IgG-B with leader |
| | FNYGIAYWGQGTLVTVSSASTTAPSVFPLAPSCGSTSGS | sequence |
| | TVALACLVSGYFPEPVTVSWNSGSLTSGVHTFPSVLQSS | |
| | GLYSLSSMVTVPSSRWPSETFTCNVAHPASKTKVDKPVP | |
| | KRENGRVPRPPDCPKCPAPEMLGGPSVFIFPPKPKDTLL | |
| | IARTPEVTCVVVDLDPEDPEVQISWFVDGKQMQTAKTQP | |
| | REEQFNGTYRVVSVLPIGHQDWLKGKQFTCKVNNKALPS | |
| | PIERTISKARGQAHQPSVYVLPPSREELSKNTVSLTCLI | |
| | KDFFPPDIDVEWQSNGQQEPESKYRTTPPQLDEDGSYFL | |
| | YSKLSVDKSRWQRGDTFICAVMHEALHNHYTQESLSHSP | |
| | GK | |
| 54 | METDTLLLWVLLLWVPGSTGIVLTQTPSSLSASLGERVS | Chimeric Clone B |
| | LTCRASQEISGYLSWLQQKPDGTIKRLIYAASTLDSGVP | variable LC and canine κ |
| | KRFSGSRSGSDFSLTISSLESEDFADYYCVQYASYPWTF | light constant region |
| | GGGARLEIKRNDAQPAVYLFQPSPDQLHTGSASVVCLLN | with leader sequence |
| | SFYPKDINVKWKVDGVIQDTGIQESVTEQDKDSTYSLSS | |
| | TLTMSSTEYLSHELYSCEITHKSLPSTLIKSFQRSECQR | |
| | VD | |
| 55 | EVQLQQSGPELVKPGASVKMSCKASGYTFTSYVMHWVKQ | Chimeric Clone I |
| | KPGQGLEWIGYINPNNDGTFYNGKFKGKATLTSDKSSST | variable HC and canine |
| | AYMELSSLTSEDSAVYYCAAFYYGFAYWGQGTLVTVSAA | IgG-B |
| | STTAPSVFPLAPSCGSTSGSTVALACLVSGYFPEPVTVS | (Chimeric I HC) |
| | WNSGSLTSGVHTFPSVLQSSGLYSLSSMVTVPSSRWPSE | |
| | TFTCNVAHPASKTKVDKPVPKRENGRVPRPPDCPKCPAP | |
| | EMLGGPSVFIFPPKPKDTLLIARTPEVTCVVVDLDPEDP | |
| | EVQISWFVDGKQMQTAKTQPREEQFNGTYRVVSVLPIGH | |
| | QDWLKGKQFTCKVNNKALPSPIERTISKARGQAHQPSVY | |
| | VLPPSREELSKNTVSLTCLIKDFFPPDIDVEWQSNGQQE | |
| | PESKYRTTPPQLDEDGSYFLYSKLSVDKSRWQRGDTFIC | |
| | AVMHEALHNHYTQESLSHSPGK | |
| 56 | DIVLTQSPSSLSASLGERVSLTCRASQEISGYLSWLQQK | Chimeric Clone I |
| | PDGTIKRLIYAASTLDSGVPKRFSGSRSGSDFSLTISSL | variable LC and canine κ |
| | ESEDFADYYCLQYASYPWTFGGGAKLEIKRNDAQPAVYL | light constant region |
| | FQPSPDQLHTGSASVVCLLNSFYPKDINVKWKVDGVIQD | (Chimeric I LC) |
| | TGIQESVTEQDKDSTYSLSSTLTMSSTEYLSHELYSCEI | |
| | THKSLPSTLIKSFQRSECQRVD | |
| 57 | MAVLGLLLCLVTFPSCVLSEVQLQQSGPELVKPGASVKM | Chimeric Clone I |
| | SCKASGYTFTSYVMHWVKQKPGQGLEWIGYINPNNDGTF | variable HC and canine |
| | YNGKFKGKATLTSDKSSSTAYMELSSLTSEDSAVYYCAA | IgG-B with leader |
| | FYYGFAYWGQGTLVTVSAASTTAPSVFPLAPSCGSTSGS | sequence |
| | TVALACLVSGYFPEPVTVSWNSGSLTSGVHTFPSVLQSS | |
| | GLYSLSSMVTVPSSRWPSETFTCNVAHPASKTKVDKPVP | |
| | KRENGRVPRPPDCPKCPAPEMLGGPSVFIFPPKPKDTLL | |
| | IARTPEVTCVVVDLDPEDPEVQISWFVDGKQMQTAKTQP | |
| | REEQFNGTYRVVSVLPIGHQDWLKGKQFTCKVNNKALPS | |
| | PIERTISKARGQAHQPSVYVLPPSREELSKNTVSLTCLI | |
| | KDFFPPDIDVEWQSNGQQEPESKYRTTPPQLDEDGSYFL | |
| | YSKLSVDKSRWQRGDTFICAVMHEALHNHYTQESLSHSP | |
| | GK | |
| 58 | METDTLLLWVLLLWVPGSTGDIVLTQSPSSLSASLGERV | Chimeric Clone I |
| | SLTCRASQEISGYLSWLQQKPDGTIKRLIYAASTLDSGV | variable LC and canine κ |
| | PKRFSGSRSGSDFSLTISSLESEDFADYYCLQYASYPWT | light constant region |
| | FGGGAKLEIKRNDAQPAVYLFQPSPDQLHTGSASVVCLL | with leader sequence |
| | NSFYPKDINVKWKVDGVIQDTGIQESVTEQDKDSTYSLS | |
| | STLTMSSTEYLSHELYSCEITHKSLPSTLIKSFQRSECQ | |
| | RVD | |
| 59 | EVQLVESGGDLVKPGGSLRLSCKASGYTFTSYVMHWVRQ | Caninized Clone B |
| | APGQGLEWVAYINPKNDGTFYNGAVKGRFTISRDNARNT | variable HC v1 |
| | LYLQMNSLRSEDTAVYYCAAFNYGIAYWGQGTLVTVSS | |
| 60 | EVQLVQSGAEVKKPGASVKVSCKASGYTFTSYVMHWVRQ | Caninized Clone B |
| | APGQGLEWMGYINPKNDGTFYNGKFQGRVTLTADTSTST | variable HC v2 |
| | AYMELSSLRAGDIAVYYCAAFNYGIAYWGQGTLVTVSS | |
| 61 | EIVMTQSPASLSLSQEEKVTITCRASQEISGYLSWLQQK | Caninized Clone B |
| | PGGTIKRLIYAASNRDTGVPSRFSGSGSGTDFSFTISSL | variable LC v1 |
| | EPEDVAVYYCVQYASYPWTFGGGAKLEIK | |
| 62 | DIVMTQTPLSLSVSPGETASISCRASQEISGYLSWLQQK | Caninized Clone B |
| | PGGTIKRLIYAASNRDTGVPDRFSGSGSGTDFTLRISRV | variable LC v2 |
| | EADDTGVYYCVQYASYPWTFGGGTKVELK | |
| 63 | EVQLVESGGDLVKPGGSLRLSCKASGYTFTSYVMHWVRQ | Caninized Clone I |
| | APGQGLEWVAYINPNNDGTFYNGAVKGRFTISRDNARNT | variable HC v1 |
| | LYLQMNSLRSEDTAVYYCAAFYYGFAYWGQGTLVTVSS | |
| 64 | EVQLVQSGAEVKKPGASVKVSCKASGYTFTSYVMHWVRQ | Caninized Clone I |
| | APGQGLEWMGYINPNNDGTFYNGKFQGRVTLTADTSTST | variable HC v2 |
| | AYMELSSLRAGDIAVYYCAAFYYGFAYWGQGTLVTVSS | |
| 274 | EVQLVQSAAEVKKPGASVKVSCKASGYTFTSYVMHWVRQ | Caninized Clone I |
| | APGQGLEWIGYINPNNDGTFYNGKFQGRVTLTADTSTGT | variable HC v3 |
| | TYTELSSLRAEDTAVYYCAAFYYGFAYWGQGTLVTVSS | |
| 65 | EIVMTQSPASLSLSQEEKVTITCRASQEISGYLSWLQQK | Caninized Clone I |
| | PGGTIKRLIYAASNRDTGVPSRFSGSGSGTDFSFTISSL | variable LC v1 |
| | EPEDVAVYYCLQYASYPWTFGGGAKLEIK | |
| 66 | DIVMTQTPLSLSVSPGETASISCRASQEISGYLSWLQQK | Caninized Clone I |
| | PGGTIKRLIYAASNRDTGVPDRFSGSGSGTDFTLRISRV | variable LC v2 |
| | EADDTGVYYCLQYASYPWTFGGGTKVELK | |
| 275 | DIVMTQTPLSLSVSPGETASISCRASQEISGYLSWLQQK | Caninized Clone I |
| | PDGTIKRLIYAASTLDSGVPDRFSGSGSGTDFTLRISRV | variable LC v3 |
| | EADDTGVYYCLQYASYPWTFGAGTKVELK | |
| 67 | QVLLVQSGAEVRKPGASVKIFCKASGYTFTSYVMHWLRQ | Felinized Clone B |
| | APAQGLEWMGYINPKNDGTFYNGKFQGRLTLTADTSTNT | variable HC |
| | AYMELSSLRSADTAVYYCAAFNYGIAYWGQGTLVTVSS | |
| 68 | DITMTQSPGSLAGSPGQQVTMNCRASQEISGYLSWLQQK | Felinized Clone B |
| | PGGTIKRLIYAASTLDSGVPDRFSGSGSGTDFTLTISNL | variable LC |
| | QAEDVASYYCVQYASYPWTFGGGTKLEIK | |
| 69 | QVLLVQSGAEVRKPGASVKIFCKASGYTFTSYVMHWLRQ | Felinized Clone I |
| | APAQGLEWMGYINPNNDGTFYNGKFQGRLTLTADTSTNT | variable HC |
| | AYMELSSLRSADTAVYYCAAFYYGFAYWGQGTLVTVSS | |
| 70 | DITMTQSPGSLAGSPGQQVTMNCRASQEISGYLSWLQQK | Felinized Clone I |
| | PGGTIKRLIYAASTLDSGVPDRFSGSGSGTDFTLTISNL | variable LC |
| | QAEDVASYYCLQYASYPWTFGGGTKLEIK | |
| 71 | EVQLVESGGDLVKPGGSLRLSCKASGYTFTSYVMHWVRQ | Caninized Clone B |
| | APGQGLEWVAYINPKNDGTFYNGAVKGRFTISRDNARNT | variable HC v1 and |
| | LYLQMNSLRSEDTAVYYCAAFNYGIAYWGQGTLVTVSSA | variant canine IgG-B |
| | STTAPSVFPLAPSCGSTSGSTVALACLVSGYFPEPVTVS | C1q-, CD16- |
| | WNSGSLISGVHTFPSVLQSSGLYSLSSMVTVPSSRWPSE | |
| | TFTCNVAHPASKTKVDKPVPKRENGRVPRPPDCPKCPAP | |
| | EPLGGPSVFIFPPKPKDTLLIARTPEVTCVVVDLDREDP | |
| | EVQISWFVDGKQMQTAKTQPREEQFNGTYRVVSVLPIGH | |
| | QDWLKGKQFTCRVNNKALPSPIERTISKARGQAHQPSVY | |
| | VLPPSREELSKNTVSLTCLIKDFFPPDIDVEWQSNGQQE | |
| | PESKYRTTPPQLDEDGSYFLYSKLSVDKSRWQRGDTFIC | |
| | AVMHEALHNHYTQESLSHSPGK | |
| 72 | EVQLVQSGAEVKKPGASVKVSCKASGYTFTSYVMHWVRQ | Caninized Clone B |
| | APGQGLEWMGYINPKNDGTFYNGKFQGRVTLTADTSTST | variable HC v2 and |
| | AYMELSSLRAGDIAVYYCAAFNYGIAYWGQGTLVTVSSA | variant canine IgG-B |
| | STTAPSVFPLAPSCGSTSGSTVALACLVSGYFPEPVTVS | C1q-, CD16- |
| | WNSGSLTSGVHTFPSVLQSSGLYSLSSMVTVPSSRWPSE | |
| | TFTCNVAHPASKTKVDKPVPKRENGRVPRPPDCPKCPAP | |
| | EPLGGPSVFIFPPKPKDTLLIARTPEVTCVVVDLDREDP | |
| | EVQISWFVDGKQMQTAKTQPREEQFNGTYRVVSVLPIGH | |
| | QDWLKGKQFTCRVNNKALPSPIERTISKARGQAHQPSVY | |
| | VLPPSREELSKNTVSLTCLIKDFFPPDIDVEWQSNGQQE | |
| | PESKYRTTPPQLDEDGSYFLYSKLSVDKSRWQRGDTFIC | |
| | AVMHEALHNHYTQESLSHSPGK | |
| 73 | EIVMTQSPASLSLSQEEKVTITCRASQEISGYLSWLQQK | Caninized Clone B |
| | PGGTIKRLIYAASNRDTGVPSRFSGSGSGTDFSFTISSL | variable LC v1 and |
| | EPEDVAVYYCVQYASYPWTFGGGAKLEIKRNDAQPAVYL | canine κ light constant |
| | FQPSPDQLHTGSASVVCLLNSFYPKDINVKWKVDGVIQD | region |
| | TGIQESVTEQDKDSTYSLSSTLTMSSTEYLSHELYSCEI | |
| | THKSLPSTLIKSFQRSECQRVD | |
| 74 | DIVMTQTPLSLSVSPGETASISCRASQEISGYLSWLQQK | Caninized Clone B |
| | PGGTIKRLIYAASNRDTGVPDRFSGSGSGTDFTLRISRV | variable LC v2 and |
| | EADDTGVYYCVQYASYPWTFGGGTKVELKRNDAQPAVYL | canine κ light constant |
| | FQPSPDQLHTGSASVVCLLNSFYPKDINVKWKVDGVIQD | region |
| | TGIQESVTEQDKDSTYSLSSTLTMSSTEYLSHELYSCEI | |
| | THKSLPSTLIKSFQRSECQRVD | |
| 75 | EVQLVESGGDLVKPGGSLRLSCKASGYTFTSYVMHWVRQ | Caninized Clone I |
| | APGQGLEWVAYINPNNDGTFYNGAVKGRFTISRDNARNT | variable HC v1 and |
| | LYLQMNSLRSEDTAVYYCAAFYYGFAYWGQGTLVTVSSA | variant canine IgG-B |
| | STTAPSVFPLAPSCGSTSGSTVALACLVSGYFPEPVTVS | C1q-, CD16- |
| | WNSGSLISGVHTFPSVLQSSGLYSLSSMVTVPSSRWPSE | |
| | TFTCNVAHPASKTKVDKPVPKRENGRVPRPPDCPKCPAP | |
| | EPLGGPSVFIFPPKPKDTLLIARTPEVTCVVVDLDREDP | |
| | EVQISWFVDGKQMQTAKTQPREEQFNGTYRVVSVLPIGH | |
| | QDWLKGKQFTCRVNNKALPSPIERTISKARGQAHQPSVY | |
| | VLPPSREELSKNTVSLTCLIKDFFPPDIDVEWQSNGQQE | |
| | PESKYRTTPPQLDEDGSYFLYSKLSVDKSRWQRGDTFIC | |
| | AVMHEALHNHYTQESLSHSPGK | |
| 76 | EVQLVQSGAEVKKPGASVKVSCKASGYTFTSYVMHWVRQ | Caninized Clone I |
| | APGQGLEWMGYINPNNDGTFYNGKFQGRVTLTADTSTST | variable HC v2 and |
| | AYMELSSLRAGDIAVYYCAAFYYGFAYWGQGTLVTVSSA | variant canine IgG-B |
| | STTAPSVFPLAPSCGSTSGSTVALACLVSGYFPEPVTVS | C1q-, CD16- |
| | WNSGSLTSGVHTFPSVLQSSGLYSLSSMVTVPSSRWPSE | |
| | TFTCNVAHPASKTKVDKPVPKRENGRVPRPPDCPKCPAP | |
| | EPLGGPSVFIFPPKPKDTLLIARTPEVTCVVVDLDREDP | |
| | EVQISWFVDGKQMQTAKTQPREEQFNGTYRVVSVLPIGH | |
| | QDWLKGKQFTCRVNNKALPSPIERTISKARGQAHQPSVY | |
| | VLPPSREELSKNTVSLTCLIKDFFPPDIDVEWQSNGQQE | |
| | PESKYRTTPPQLDEDGSYFLYSKLSVDKSRWQRGDTFIC | |
| | AVMHEALHNHYTQESLSHSPGK | |
| 276 | EVQLVQSAAEVKKPGASVKVSCRASGYTFTSYVMHWVRQAPGQ | Caninized Clone I |
| | GLEWIGYINPNNDGTFYNGKFQGRVTLTADTSTGTTYTELSSL | variable HC v3 and |
| | RAEDTAVYYCAAFYYGFAYWGQGTLVTVSSASTTAPSVFPLAP | variant canine IgG-B |
| | SCGSTSGSTVALACLVSGYFPEPVTVSWNSGSLTSGVHTEPSV | C1q-, CD16- |
| | LQSSGLYSLSSMVTVPSSRWPSETFTCNVAHPASKTKVDKPVP | |
| | KRENGRVPRPPDCPKCPAPEPLGGPSVFIFPPKPKDTLLIART | |
| | PEVTCVVVDLDREDPEVQISWFVDGKQMQTAKTQPREEQPNGT | |
| | YRVVSVLPIGHQDWLKGKQFTCRVNNKALPSPIERTISKARGQ | |
| | AHQPSVYVLPPSREELSKNIVSLTCLIKDFFPPDIDVEWQSNG | |
| | QQEPESKYRTIPPQLDEDGSYFLYSKLSVDKSRWQRGDTFICA | |
| | VMHEALHNHYTQESLSHSPGK | |
| 77 | EIVMTQSPASLSLSQEEKVTITCRASQEISGYLSWLQQK | Caninized Clone I |
| | PGGTIKRLIYAASNRDTGVPSRFSGSGSGTDFSFTISSL | variable LC v1 and |
| | EPEDVAVYYCLQYASYPWTFGGGAKLEIKRNDAQPAVYL | canine κ light constant |
| | FQPSPDQLHTGSASVVCLLNSFYPKDINVKWKVDGVIQD | region |
| | TGIQESVTEQDKDSTYSLSSTLTMSSTEYLSHELYSCEI | |
| | THKSLPSTLIKSFQRSECQRVD | |
| 78 | DIVMTQTPLSLSVSPGETASISCRASQEISGYLSWLQQK | Caninized Clone I |
| | PGGTIKRLIYAASNRDTGVPDRFSGSGSGTDFTLRISRV | variable LC v2 and |
| | EADDTGVYYCLQYASYPWTFGGGTKVELKRNDAQPAVYL | canine κ light constant |
| | FQPSPDQLHTGSASVVCLLNSFYPKDINVKWKVDGVIQD | region |
| | TGIQESVTEQDKDSTYSLSSTLTMSSTEYLSHELYSCEI | |
| | THKSLPSTLIKSFQRSECQRVD | |
| 277 | DIVMTQTPLSLSVSPGETASISCRASQEISGYLSWLQQK | Caninized Clone I |
| | PDGTIKRLIYAASTLDSGVPDRFSGSGSGTDFTLRISRV | variable LC v3 and |
| | EADDTGVYYCLQYASYPWTFGAGTKVELKRNDAQPAVYL | canine κ light constant |
| | FQPSPDQLHTGSASVVCLLNSFYPKDINVKWKVDGVIQD | region |
| | TGIQESVTEQDKDSTYSLSSTLTMSSTEYLSHELYSCEI | |
| | THKSLPSTLIKSFQRSECQRVD | |
| 79 | QVLLVQSGAEVRKPGASVKIFCKASGYTFTSYVMHWLRQ | Felinized Clone B |
| | APAQGLEWMGYINPKNDGTFYNGKFQGRLTLTADTSTNT | variable HC and variant |
| | AYMELSSLRSADTAVYYCAAFNYGIAYWGQGTLVTVSSA | feline IgG2 with hinge |
| | STTASSVFPLAPSCGTTSGATVALACLVLGYFPEPVTVS | Cys modification |
| | WNSGALTSGVHTFPSVLQASGLYSLSSMVTVPSSRWLSD | |
| | TFTCNVAHRPSSTKVDKTVPKTASTIESKTGECPKCPVP | |
| | EIPGAPSVFIFPPKPKDTLSISRTPEVTCLVVDLGPDDS | |
| | NVQITWFVDNTEMHTAKTRPREEQFNSTYRVVSVLPILH | |
| | QDWLKGKEFKCKVNSKSLPSAMERTISKAKGQPHEPQVY | |
| | VLPPTQEELSENKVSVTCLIKGFHPPDIAVEWEITGQPE | |
| | PENNYQTTPPQLDSDGTYFLYSRLSVDRSHWQRGNTYTC | |
| | SVSHEALHSHHTQKSLIQSPGK | |
| 80 | QVLLVQSGAEVRKPGASVKIFCKASGYTFTSYVMHWLRQ | Felinized Clone B |
| | APAQGLEWMGYINPKNDGTFYNGKFQGRLTLTADTSTNT | variable HC and variant |
| | AYMELSSLRSADTAVYYCAAFNYGIAYWGQGTLVTVSSA | feline IgG2 with feline |
| | STTASSVFPLAPSCGTTSGATVALACLVLGYFPEPVTVS | IgG1hinge |
| | WNSGALTSGVHTFPSVLQASGLYSLSSMVTVPSSRWLSD | |
| | TFTCNVAHRPSSTKVDKTV [symbol] [symbol] [symbol] | |
| | [symbol] SVFIFPPKPKDTLSISRTPEVTCLVVDLGPDDS | |
| | NVQITWFVDNTEMHTAKTRPREEQFNSTYRVVSVLPILH | |
| | QDWLKGKEFKCKVNSKSLPSAMERTISKAKGQPHEPQVY | |
| | VLPPTQEELSENKVSVTCLIKGFHPPDIAVEWEITGQPE | |
| | PENNYQTTPPQLDSDGTYFLYSRLSVDRSHWQRGNTYTC | |
| | SVSHEALHSHHTQKSLTQSPGK | |
| 81 | DITMTQSPGSLAGSPGQQVTMNCRASQEISGYLSWLQQK | Felinized Clone B |
| | PGGTIKRLIYAASTLDSGVPDRFSGSGSGTDFTLTISNL | variable LC and feline |
| | QAEDVASYYCVQYASYPWTFGGGTKLEIKRSDAQPSVFL | κ light constant region |
| | FQPSLDELHTGSASIVCILNDFYPKEVNVKWKVDGVVQN | |
| | KGIQESTTEQNSKDSTYSLSSTLTMSSTEYQSHEKFSCE | |
| | VTHKSLASTLVKSFNRSECQRE | |
| 82 | QVLLVQSGAEVRKPGASVKIFCKASGYTFTSYVMHWLRQ | Felinized Clone I |
| | APAQGLEWMGYINPNNDGTFYNGKFQGRLTLTADTSTNT | variable HC and variant |
| | AYMELSSLRSADTAVYYCAAFYYGFAYWGQGTLVTVSSA | feline IgG2 with hinge |
| | STTASSVFPLAPSCGTTSGATVALACLVLGYFPEPVTVS | Cys modification |
| | WNSGALTSGVHTFPSVLQASGLYSLSSMVTVPSSRWLSD | |
| | TFTCNVAHRPSSTKVDKTVPKTASTIESKTGECPKCPVP | |
| | EIPGAPSVFIFPPKPKDTLSISRTPEVTCLVVDLGPDDS | |
| | NVQITWFVDNTEMHTAKTRPREEQFNSTYRVVSVLPILH | |
| | QDWLKGKEFKCKVNSKSLPSAMERTISKAKGQPHEPQVY | |
| | VLPPTQEELSENKVSVTCLIKGFHPPDIAVEWEITGQPE | |
| | PENNYQTTPPQLDSDGTYFLYSRLSVDRSHWQRGNTYTC | |
| | SVSHEALHSHHTQKSLTQSPGK | |
| 83 | QVLLVQSGAEVRKPGASVKIFCKASGYTFTSYVMHWLRQ | Felinized Clone I |
| | APAQGLEWMGYINPNNDGTFYNGKFQGRLTLTADTSTNT | variable HC and variant |
| | AYMELSSLRSADTAVYYCAAFYYGFAYWGQGTLVTVSSA | feline IgG2 with feline |
| | STTASSVFPLAPSCGTTSGATVALACLVLGYFPEPVTVS | IgG1 hinge |
| | WNSGALTSGVHTFPSVLQASGLYSLSSMVTVPSSRWLSD | |
| | TFTCNVAHRPSSTKVDKTV [symbol] [symbol] [symbol] | |
| | [symbol] SVFIFPPKPKDTLSISRTPEVTCLVVDLGPDDS | |
| | NVQITWFVDNTEMHTAKTRPREEQFNSTYRVVSVLPILH | |
| | QDWLKGKEFKCKVNSKSLPSAMERTISKAKGQPHEPQVY | |
| | VLPPTQEELSENKVSVTCLIKGFHPPDIAVEWEITGQPE | |
| | PENNYQTTPPQLDSDGTYFLYSRLSVDRSHWQRGNTYTC | |
| | SVSHEALHSHHTQKSLTQSPGK | |
| 84 | DITMTQSPGSLAGSPGQQVTMNCRASQEISGYLSWLQQK | Felinized Clone I |
| | PGGTIKRLIYAASTLDSGVPDRFSGSGSGTDFTLTISNL | variable LC and feline |
| | QAEDVASYYCLQYASYPWTFGGGTKLEIKRSDAQPSVFL | κ light constant region |
| | FQPSLDELHTGSASIVCILNDFYPKEVNVKWKVDGVVQN | |
| | KGIQESTTEQNSKDSTYSLSSTLTMSSTEYQSHEKFSCE | |
| | VTHKSLASTLVKSFNRSECQRE | |
| 85 | LX₁₀FMGSENX₁₁T | IL4R epitope 1 |
| | wherein X₁₀ is D or N and X₁₁ is H or R | (minimal sequence) |
| 86 | RLSYQLX₁₀FMGSENX₁₁TCVPEN | IL4R epitope 1 |
| | wherein X₁₀ is D or N and X₁₁ is H or R | (expanded sequence) |
| 87 | SMX₁₂X₁₃DDX₁₄VEADVYQLX₁₅LWAGX₁₆Q | IL4R epitope 2 |
| | wherein X₁₂ is P or L, X₁₃ is I or M, X₁₄ | |
| | is A or F, X₁₅ is D or H, and X₁₆ is Q or | |
| | T | |
| 88 | LDFMGSENHT | Canine IL4R epitope 1 |
| | | (minimal sequence) |
| 89 | RLSYQLDFMGSENHTCVPEN | Canine IL4R epitope 1 |
| | | (expanded sequence) |
| 90 | SMPIDDAVEADVYQLDLWAG44 | Canine IL4R epitope 2 |
| 91 | LNFMGSENRT | Feline IL4R epitope 1 |
| | | (minimal sequence) |
| 92 | RLSYQLNFMGSENRTCVPEN | Feline IL4R epitope 1 |
| | | (expanded sequence) |
| 93 | SMLMDDFVEADVYQLHLWAGTQ | Feline IL4R epitope 2 |
| 94 | MGRLCSGLTFPVSCLVLVWVASSGSVKVLHEPSCFSDYI | Canine IL4R |
| | STSVCQWKMDHPTNCSAELRLSYQLDFMGSENHTCVPEN | NCBI Reference |
| | REDSVCVCSMPIDDAVEADVYQLDLWAGQQLLWSGSFQP | Sequence: |
| | SKHVKPRTPGNLTVHPNISHTWLLMWTNPYPTENHLHSE | XP_0139700003.1 |
| | LTYMVNVSNDNDPEDFKVYNVTYMGPTLRLAASTLKSGA | Interleukin-4 receptor |
| | SYSARVRAWAQTYNSTWSDWSPSTTWLNYYEPWEQHLPL | subunit alpha isoform |
| | GVSISCLVILAICLSCYFSIIKIKKGWWDQIPNPAHSPL | X1 [Canis lupus |
| | VAIVIQDSQVSLWGKRSRGQEPAKCPHWKTCLTKLLPCL | familiaris] |
| | LEHGLGREEESPKTAKNGPLQGPGKPAWCPVEVSKTILW | |
| | PESISVVQCVELSEAPVDNEEEEEVEEDKRSLCPSLEGS | |
| | GGSFQEGREGIVARLTESLFLDLLGGENGGFCPQGLEES | |
| | CLPPPSGSVGAQMPWAQFPRAGPRAAPEGPEQPRRPESA | |
| | LQASPTQSAGSSAFPEPPPVVTDNPAYRSFGSFLGQSSD | |
| | PGDGDSDPELADRPGEADPGIPSAPQPPEPPAALQPEPE | |
| | SWEQILRQSVLQHRAAPAPGPGPGSGYREFTCAVKQGSA | |
| | PDAGGPGFGPSGEAGYKAFCSLLPGGATCPGTSGGEAGS | |
| | GEGGYKPFQSLIPGCPGAPTPVPVPLFTFGLDTEPPGSP | |
| | QDSLGAGSSPEHLGVEPAGKEEDSRKTLLAPEQATDPLR | |
| | DDLASSIVYSALTCHLCGHLKQWHDQEERGKAHIVPSPC | |
| | CGCCCGDRSSLLLSPLRAPNVLPGGVLLEASLSPASLVP | |
| | SGVSKEGKSSPFSQPASSSAQSSSQTPKKLAVLSTEPTC | |
| | MSAS | |
| 95 | MGRLCSGLTFPVSCLILMWAAGSGSVKVLRAPTCFSDYF | Feline IL4R |
| | STSVCQWNMDAPTNCSAELRLSYQLNFMGSENRTCVPEN | NCBI Reference |
| | GEGAACACSMLMDDFVEADVYQLHLWAGTQLLWSGSFKP | Sequence: |
| | SSHVKPRAPGNLTVHPNVSHTWLLRWSNPYPPENHLHAE | XP_023102076.1 |
| | LTYMVNISSEDDPTDSRIYNVTYMGPTLRVAASTLTSGA | Interleukin-4 receptor |
| | SYSARVRAWAQSYNSTWSEWSPSTKWLNHYEPWEQHLPL | subunit alpha [Felis |
| | GVSISCLVILAVCLSCYLSVIKIKKEWWDQIPNPAHSHL | catus] |
| | VAIVIQDPQVSLWGKRSRGQEPAKCSHWKTCLRKLLPCL | |
| | LEHGMERKEDPSKIARNGPSQGSGKSAWCPVEVSKTILW | |
| | PESISVVRCVELLEAPVESEEEEEEEEEDKGSFCPSPVN | |
| | LEDSFQEGREGIAARLTESLFMDLLGVEKGGFGPQGSLE | |
| | SWFPPPSGSAGAQMPWAEFPGPGPQEASPQGKEQPFDPR | |
| | SDPLATLPQSPASPTFPETPPVVTDNPAYRSFGTFQGRS | |
| | SGPGECDSGPELAGRLGEADPGIPAAPQPSEPPSALQPE | |
| | AETWEQILRQRVLQHRGAPAPAPGSGYREFVCAVRQGST | |
| | QDSRVGDFGPSEEAGYKAFSSLLTSGAVCPETSGGEAGS | |
| | GDGGYKPFQSLIPGCPGAPAPVPVPLFTFGLDAEPPHCP | |
| | QDSPLPGSSPEPAGKAQDSHKTPPAPEQAADPLRDDLAS | |
| | GIVYSALTCHLCGHLKQCHGQEEGGEAHPVASPCCGCCC | |
| | GDRSSPLVSPLRAPDPLPGGVPLEASLSPASPAPLAVSE | |
| | EGPPSLCFQPALSHAHSSSQTPKKVAMLSPEPTCTMAS | |
| 96 | MGCLCPGLTLPVSCLILVWAAGSGSVKVLRLTACFSDYI | Equine IL4R |
| | SASTCEWKMDRPTNCSAQLRLSYQLNDEFSDNLTCIPEN | NCBI Reference |
| | REDEVCVCRMLMDNIVSEDVYELDLWAGNQLLWNSSFKP | Sequence: |
| | SRHVKPRAPQNLTVHAISHTWLLTWSNPYPLKNHLWSEL | NP_001075243.1 |
| | TYLVNISKEDDPTDFKIYNVTYMDPTLRVTASTLKSRAT | Interleukin-4 receptor |
| | YSARVKARAQNYNSTWSEWSPSTTWHNYYEQPLEQRLPL | subunit alpha precursor |
| | GVSISCVVILAICLSCYFSIIKIKKEWWDQIPNPAHSPL | [Equus caballus] |
| | VAIVLQDSQVSLWGKQSRGQEPAKCPRWKTCLTKLLPCL | |
| | LEHGLQKEEDSSKTVRNGPFQSPGKSAWHTVEVNHTILR | |
| | PEIISVVPCVELCEAQVESEEEEVEEDRGSFCPSPESSG | |
| | SGFQEGREGVAARLTESLFLGLLGAENGALGESCLLPPL | |
| | GSAHMPWARISSAGPQEAASQGEEQPLNPESNPLATLTQ | |
| | SPGSLAFTEAPAVVADNPAYRSFSNSLSQPRGPGELDSD | |
| | PQLAEHLGQVDPSIPSAPQPSEPPTALQPEPETWEQMLR | |
| | QSVLQQGAAPAPASAPTGGYREFAQVVKQGGGAAGSGPS | |
| | GEAGYKAFSSLLAGSAVCPGQSGVEASSGEGGYRPYESP | |
| | DPGAPAPVPVPLFTFGLDVEPPHSPQNSLLPGGSPELPG | |
| | PEPTVKGEDPRKPLLSAQQATDSLRDDLGSGIVYSALTC | |
| | HLCGHLKQCHGQEEHGEAHTVASPCCGCCCGDRSSPPVS | |
| | PVRALDPPPGGVPLEAGLSLASLGSLGLSEERKPSLFFQ | |
| | PAPGNAQSSSQTPLTVAMLSTGPTCTSAS | |
| 97 | MGRLCTKFLTSVGCLILLLVTGSGSIKVLGEPTCFSDYI | Murine IL4R |
| | RTSTCEWFLDSAVDCSSQLCLHYRLMFFEFSENLTCIPR | NCBI Reference |
| | NSASTVCVCHMEMNRPVQSDRYQMELWAEHRQLWQGSFS | Sequence: |
| | PSGNVKPLAPDNLTLHTNVSDEWLLTWNNLYPSNNLLYK | NP_001008700.1 |
| | DLISMVNISREDNPAEFIVYNVTYKEPRLSFPINILMSG | Inter1eukin-4 receptor |
| | VYYTARVRVRSQILTGTWSEWSPSITWYNHFQLPLIQRL | subunit alpha isoform 1 |
| | PLGVTISCLCIPLFCLFCYFSITKIKKIWWDQIPTPARS | precursor [Mus |
| | PLVAIIIQDAQVPLWDKQTRSQESTKYPHWKTCLDKLLP | musculus] |
| | CLLKHRVKKKTDFPKAAPTKSLQSPGKAGWCPMEVSRTV | |
| | LWPENVSVSVVRCMELFEAPVQNVEEEEDEIVKEDLSMS | |
| | PENSGGCGFQESQADIMARLTENLFSDLLEAENGGLGQS | |
| | ALAESCSPLPSGSGQASVSWACLPMGPSEEATCQVIEQP | |
| | SHPGPLSGSPAQSAPTLACTQVPLVLADNPAYRSFSDCC | |
| | SPAPNPGELAPEQQQADHLEEEEPPSPADPHSSGPPMQP | |
| | VESWEQILHMSVLQHGAAAGSTPAPAGGYQEFVQAVKQG | |
| | AAQDPGVPGVRPSGDPGYKAFSSLLSSNGIRGDTAAAGT | |
| | DDGHGGYKPFQNPVPNQSPSSVPLFTFGLDTELSPSPLN | |
| | SDPPKSPPECLGLELGLKGGDWVKAPPPADQVPKPFGDD | |
| | LGFGIVYSSLTCHLCGHLKQHHSQEEGGQSPIVASPGCG | |
| | CCYDDRSPSLGSLSGALESCPEGIPPEANLMSAPKTPSN | |
| | LSGEGKGPGHSPVPSQTTEVPVGALGIAVS | |
| 98 | MGWLCSGLLFPVSCLVLLQVASSGNMKVLQEPTCVSDYM | Human IL4R |
| | SISTCEWKMNGPTNCSTELRLLYQLVFLLSEAHTCIPEN | NCBI Reference |
| | NGGAGCVCHLLMDDVVSADNYTLDLWAGQQLLWKGSFKP | Sequence: |
| | SEHVKPRAPGNLTVHTNVSDTLLLTWSNPYPPDNYLYNH | NP_000409.1 |
| | LTYAVNIWSENDPADFRIYNVTYLEPSLRIAASTLKSGI | Interleukin-4 receptor |
| | SYRARVRAWAQCYNTTWSEWSPSTKWHNSYREPFEQHLL | subunit alpha isoform a |
| | LGVSVSCIVILAVCLLCYVSITKIKKEWWDQIPNPARSR | precursor [Homo |
| | LVAIIIQDAQGSQWEKRSRGQEPAKCPHWKNCLTKLLPC | sapiens] |
| | FLEHNMKRDEDPHKAAKEMPFQGSGKSAWCPVEISKTVL | |
| | WPESISVVRCVELFEAPVECEEEEEVEEEKGSFCASPES | |
| | SRDDFQEGREGIVARLTESLFLDLLGEENGGFCQQDMGE | |
| | SCLLPPSGSTSAHMPWDEFPSAGPKEAPPWGKEQPLHLE | |
| | PSPPASPTQSPDNLTCTETPLVIAGNPAYRSFSNSLSQS | |
| | PCPRELGPDPLLARHLEEVEPEMPCVPQLSEPTTVPQPE | |
| | PETWEQILRRNVLQHGAAAAPVSAPTSGYQEFVHAVEQG | |
| | GTQASAVVGLGPPGEAGYKAFSSLLASSAVSPEKCGFGA | |
| | SSGEEGYKPFQDLIPGCPGDPAPVPVPLFTFGLDREPPR | |
| | SPQSSHLPSSSPEHLGLEPGEKVEDMPKPPLPQEQATDP | |
| | LVDSLGSGIVYSALTCHLCGHLKQCHGQEDGGQTPVMAS | |
| | PCCGCCCGDRSSPPTTPLRAPDPSPGGVPLEASLCPASL | |
| | APSGISEKSKSSSSFHPAPGNAQSSSQTPKIVNFVSVGP | |
| | TYMRVS | |
| 99 | GSVKVLHEPSCFSDYISTSVCQWKMDHPTNCSAELRLSY | Canine IL4R_ECD |
| | QLDFMGSENHTCVPENREDSVCVCSMPIDDAVEADVYQL | |
| | DLWAGQQLLWSGSFQPSKHVKPRTPGNLTVHPNISHTWL | |
| | LMWTNPYPTENHLHSELTYMVNVSNDNDPEDFKVYNVTY | |
| | MGPTLRLAASTLKSGASYSARVRAWAQTYNSTWSDWSPS | |
| | TTWLNYYE | |
| 100 | GSVKVLRAPTCFSDYFSTSVCQWNMDAPTNCSAELRLSY | Feline IL4R_ECD |
| | QLNFMGSENRTCVPENGEGAACACSMLMDDFVEADVYQL | |
| | HLWAGTQLLWSGSFKPSSHVKPRAPGNLTVHPNVSHTWL | |
| | LRWSNPYPPENHLHAELTYMVNISSEDDPTDSRIYNVTY | |
| | MGPTLRVAASTLTSGASYSARVRAWAQSYNSTWSEWSPS | |
| | TKWLNHYE | |
| 101 | VKVLRLTACFSDYISASTCEWKMDRPTNCSAQLRLSYQL | Equine IRL4_ECD |
| | NDEFSDNLTCIPENREDEVCVCRMLMDNIVSEDVYELDL | |
| | WAGNQLLWNSSFKPSRHVKPRAPQNLTVHAISHTWLLTW | |
| | SNPYPLKNHLWSELTYLVNISKEDDPTDFKIYNVTYMDP | |
| | TLRVTASTLKSRATYSARVKARAQNYNSTWSEWSPSTTW | |
| | HNYYEQPLEQR | |
| 102 | IKVLGEPTCFSDYIRTSTCEWFLDSAVDCSSQLCLHYRL | Murine IL4R_ECD |
| | MFFEFSENLTCIPRNSASTVCVCHMEMNRPVQSDRYQME | |
| | LWAEHRQLWQGSFSPSGNVKPLAPDNLTLHTNVSDEWLL | |
| | TWNNLYPSNNLLYKDLISMVNISREDNPAEFIVYNVTYK | |
| | EPRLSFPINILMSGVYYTARVRVRSQILTGTWSEWSPSI | |
| | TWYNHFQLPLIQRLPLGVTISCLCIPLFCLFCYFSITKI | |
| | KKIW | |
| 103 | GNMKVLQEPTCVSDYMSISTCEWKMNGPTNCSTELRLLY | Human IL4R_ECD |
| | QLVFLLSEAHTCIPENNGGAGCVCHLLMDDVVSADNYTL | |
| | DLWAGQQLLWKGSFKPSEHVKPRAPGNLTVHTNVSDTLL | |
| | LTWSNPYPPDNYLYNHLTYAVNIWSENDPADFRIYNVTY | |
| | LEPSLRIAASTLKSGISYRARVRAWAQCYNTTWSEWSPS | |
| | TKWHNSYREPFEQH | |
| 104 | MGRLCSGLTFPVSCLVLVWVASSGSVKVLHEPSCFSDYI | Canine IL4R_C-FLAG |
| | STSVCQWKMDHPTNCSAELRLSYQLDFMGSENHTCVPEN | with leader |
| | REDSVCVCSMPIDDAVEADVYQLDLWAGQQLLWSGSFQP | |
| | SKHVKPRTPGNLTVHPNISHTWLLMWTNPYPTENHLHSE | |
| | LTYMVNVSNDNDPEDFKVYNVTYMGPTLRLAASTLKSGA | |
| | SYSARVRAWAQTYNSTWSDWSPSTTWLNYYEPWEQHLPL | |
| | GVSISCLVILAICLSCYFSIIKIKKGWWDQIPNPAHSPL | |
| | VAIVIQDSQVSLWGKRSRGQEPAKCPHWKTCLTKLLPCL | |
| | LEHGLGREEESPKTAKNGPLQGPGKPAWCPVEVSKTILW | |
| | PESISVVQCVELSEAPVDNEEEEEVEEDKRSLCPSLEGS | |
| | GGSFQEGREGIVARLTESLFLDLLGGENGGFCPQGLEES | |
| | CLPPPSGSVGAQMPWAQFPRAGPRAAPEGPEQPRRPESA | |
| | LQASPTQSAGSSAFPEPPPVVTDNPAYRSFGSFLGQSSD | |
| | PGDGDSDPELADRPGEADPGIPSAPQPPEPPAALQPEPE | |
| | SWEQILRQSVLQHRAAPAPGPGPGSGYREFTCAVKQGSA | |
| | PDAGGPGFGPSGEAGYKAFCSLLPGGATCPGTSGGEAGS | |
| | GEGGYKPFQSLIPGCPGAPTPVPVPLFTFGLDTEPPGSP | |
| | QDSLGAGSSPEHLGVEPAGKEEDSRKTLLAPEQATDPLR | |
| | DDLASSIVYSALTCHLCGHLKQWHDQEERGKAHIVPSPC | |
| | CGCCCGDRSSLLLSPLRAPNVLPGGVLLEASLSPASLVP | |
| | SGVSKEGKSSPFSQPASSSAQSSSQTPKKLAVLSTEPTC | |
| | MSASGSGSDYKDDDDK | |
| 105 | GSVKVLHEPSCFSDYISTSVCQWKMDHPTNCSAELRLSY | Canine IL4R_C-FLAG |
| | QLDFMGSENHTCVPENREDSVCVCSMPIDDAVEADVYQL | |
| | DLWAGQQLLWSGSFQPSKHVKPRTPGNLTVHPNISHTWL | |
| | LMWTNPYPTENHLHSELTYMVNVSNDNDPEDFKVYNVTY | |
| | MGPTLRLAASTLKSGASYSARVRAWAQTYNSTWSDWSPS | |
| | TTWLNYYEPWEQHLPLGVSISCLVILAICLSCYFSIIKI | |
| | KKGWWDQIPNPAHSPLVAIVIQDSQVSLWGKRSRGQEPA | |
| | KCPHWKTCLTKLLPCLLEHGLGREEESPKTAKNGPLQGP | |
| | GKPAWCPVEVSKTILWPESISVVQCVELSEAPVDNEEEE | |
| | EVEEDKRSLCPSLEGSGGSFQEGREGIVARLTESLFLDL | |
| | LGGENGGFCPQGLEESCLPPPSGSVGAQMPWAQFPRAGP | |
| | RAAPEGPEQPRRPESALQASPTQSAGSSAFPEPPPVVTD | |
| | NPAYRSFGSFLGQSSDPGDGDSDPELADRPGEADPGIPS | |
| | APQPPEPPAALQPEPESWEQILRQSVLQHRAAPAPGPGP | |
| | GSGYREFTCAVKQGSAPDAGGPGFGPSGEAGYKAFCSLL | |
| | PGGATCPGTSGGEAGSGEGGYKPFQSLIPGCPGAPTPVP | |
| | VPLFTFGLDTEPPGSPQDSLGAGSSPEHLGVEPAGKEED | |
| | SRKTLLAPEQATDPLRDDLASSIVYSALTCHLCGHLKQW | |
| | HDQEERGKAHIVPSPCCGCCCGDRSSLLLSPLRAPNVLP | |
| | GGVLLEASLSPASLVPSGVSKEGKSSPFSQPASSSAQSS | |
| | SQTPKKLAVLSTEPTCMSASGSGSDYKDDDDK | |
| 106 | MDMRVPAQLLGLLLLWLRGARCSGSVKVLHEPSCFSDYI | Canine IL4R-ECD_C- |
| | STSVCQWKMDHPINCSAELRLSYQLDFMGSENHTCVPEN | His6 with leader |
| | REDSVCVCSMPIDDAVEADVYQLDLWAGQQLLWSGSFQP | |
| | SKHVKPRTPGNLTVHPNISHTWLLMWTNPYPTENHLHSE | |
| | LTYMVNVSNDNDPEDFKVYNVTYMGPTLRLAASTLKSGA | |
| | SYSARVRAWAQTYNSTWSDWSPSTTWLNYYEPGSGSHHH | |
| | HHH | |
| 107 | GSVKVLHEPSCFSDYISTSVCQWKMDHPTNCSAELRLSY | Canine IL4R-ECD_C- |
| | QLDFMGSENHTCVPENREDSVCVCSMPIDDAVEADVYQL | His6 |
| | DLWAGQQLLWSGSFQPSKHVKPRTPGNLTVHPNISHTWL | |
| | LMWTNPYPTENHLHSELTYMVNVSNDNDPEDFKVYNVTY | |
| | MGPTLRLAASTLKSGASYSARVRAWAQTYNSTWSDWSPS | |
| | TTWLNYYEPGSGSHHHHHH | |
| 108 | MDMRVPAQLLGLLLLWLRGARCSGSVKVLHEPSCFSDYI | Canine IL4R-ECD_ |
| | STSVCQWKMDHPTNCSAELRLSYQLDFMGSENHTCVPEN | C-HuFc_His6 with |
| | REDSVCVCSMPIDDAVEADVYQLDLWAGQQLLWSGSFQP | leader |
| | SKHVKPRTPGNLTVHPNISHTWLLMWTNPYPTENHLHSE | |
| | LTYMVNVSNDNDPEDFKVYNVTYMGPTLRLAASTLKSGA | |
| | SYSARVRAWAQTYNSTWSDWSPSTTWLNYYEPGSENLYF | |
| | QGPKSCDKTHTCPPCPAPELLGGPSVFLFPPKPKDTLMI | |
| | SRIPEVTCVVVDVSHEDPEVKFNWYVDGVEVHNAKTKPR | |
| | EEQYNSTYRVVSVLTVLHQDWLNGKEYKCKVSNKALPAP | |
| | IEKTISKAKGQPREPQVYTLPPSRDELTKNQVSLTCLVK | |
| | GFYPSDIAVEWESNGQPENNYKTTPPVLDSDGSFFLYSK | |
| | LTVDKSRWQQGNVFSCSVMHEALHNHYTQKSLSLSPGKH | |
| | HHHHH | |
| 109 | GSVKVLHEPSCFSDYISTSVCQWKMDHPTNCSAELRLSY | Canine IL4R-ECD_ |
| | QLDFMGSENHTCVPENREDSVCVCSMPIDDAVEADVYQL | C-HuFc_His6 |
| | DLWAGQQLLWSGSFQPSKHVKPRTPGNLTVHPNISHTWL | |
| | LMWTNPYPTENHLHSELTYMVNVSNDNDPEDFKVYNVTY | |
| | MGPTLRLAASTLKSGASYSARVRAWAQTYNSTWSDWSPS | |
| | TTWLNYYEPGSENLYFQGPKSCDKTHTCPPCPAPELLGG | |
| | PSVFLFPPKPKDTLMISRTPEVTCVVVDVSHEDPEVKFN | |
| | WYVDGVEVHNAKTKPREEQYNSTYRVVSVLTVLHQDWLN | |
| | GKEYKCKVSNKALPAPIEKTISKAKGQPREPQVYTLPPS | |
| | RDELTKNQVSLTCLVKGFYPSDIAVEWESNGQPENNYKT | |
| | TPPVLDSDGSFFLYSKLTVDKSRWQQGNVFSCSVMHEAL | |
| | HNHYTQKSLSLSPGKHHHHHH | |
| 110 | MDMRVPAQLLGLLLLWLRGARCGSVKVLRAPTCFSDYFS | Feline IL4R-ECD_ |
| | TSVCQWNMDAPTNCSAELRLSYQLNFMGSENRTCVPENG | C-HuFc_His6 with |
| | EGAACACSMLMDDFVEADVYQLHLWAGTQLLWSGSFKPS | leader |
| | SHVKPRAPGNLTVHPNVSHTWLLRWSNPYPPENHLHAEL | |
| | TYMVNISSEDDPTDSRIYNVTYMGPTLRVAASTLTSGAS | |
| | YSARVRAWAQSYNSTWSDWSPSTTWLNYYEGSENLYFQG | |
| | PKSCDKTHTCPPCPAPELLGGPSVFLFPPKPKDTLMISR | |
| | TPEVTCVVVDVSHEDPEVKFNWYVDGVEVHNAKTKPREE | |
| | QYNSTYRVVSVLTVLHQDWLNGKEYKCKVSNKALPAPIE | |
| | KTISKAKGQPREPQVYTLPPSRDELTKNQVSLTCLVKGF | |
| | YPSDIAVEWESNGQPENNYKTTPPVLDSDGSFFLYSKLT | |
| | VDKSRWQQGNVFSCSVMHEALHNHYTQKSLSLSPGKHHH | |
| | HHH | |
| 111 | GSVKVLRAPTCFSDYFSTSVCQWNMDAPTNCSAELRLSY | Feline IL4R-ECD_ |
| | QLNFMGSENRTCVPENGEGAACACSMLMDDFVEADVYQL | C-HuFc_His6 |
| | HLWAGTQLLWSGSFKPSSHVKPRAPGNLTVHPNVSHTWL | |
| | LRWSNPYPPENHLHAELTYMVNISSEDDPTDSRIYNVTY | |
| | MGPTLRVAASTLTSGASYSARVRAWAQSYNSTWSDWSPS | |
| | TTWLNYYEGSENLYFQGPKSCDKTHTCPPCPAPELLGGP | |
| | SVFLFPPKPKDTLMISRTPEVTCVVVDVSHEDPEVKFNW | |
| | YVDGVEVHNAKTKPREEQYNSTYRVVSVLTVLHQDWLNG | |
| | KEYKCKVSNKALPAPIEKTISKAKGQPREPQVYTLPPSR | |
| | DELTKNQVSLTCLVKGFYPSDIAVEWESNGQPENNYKTT | |
| | PPVLDSDGSFFLYSKLTVDKSRWQQGNVFSCSVMHEALH | |
| | NHYTQKSLSLSPGKHHHHHH | |
| 112 | MPSSVSWGILLLAGLCCLVPVSLAVKVLRLTACFSDYIS | Equine IL4R-ECD_ |
| | ASTCEWKMDRPTNCSAQLRLSYQLNDEFSDNLTCIPENR | C-HuFc_His6 with |
| | EDEVCVCRMLMDNIVSEDVYELDLWAGNQLLWNSSFKPS | leader |
| | RHVKPRAPQNLTVHAISHTWLLTWSNPYPLKNHLWSELT | |
| | YLVNISKEDDPTDFKIYNVTYMDPTLRVTASTLKSRATY | |
| | SARVKARAQNYNSTWSEWSPSTTWHNYYEQPLEQRGGGS | |
| | GGGSENLYFQGPKSCDKTHTCPPCPAPELLGGPSVFLFP | |
| | PKPKDTLMISRTPEVTCVVVDVSHEDPEVKFNWYVDGVE | |
| | VHNAKTKPREEQYNSTYRVVSVLTVLHQDWLNGKEYKCK | |
| | VSNKALPAPIEKTISKAKGQPREPQVYTLPPSRDELTKN | |
| | QVSLTCLVKGFYPSDIAVEWESNGQPENNYKTTPPVLDS | |
| | DGSFFLYSKLTVDKSRWQQGNVFSCSVMHEALHNHYTQK | |
| | SLSLSPGKHHHHHH | |
| 113 | VKVLRLTACFSDYISASTCEWKMDRPTNCSAQLRLSYQL | Equine IL4R-ECD_ |
| | NDEFSDNLTCIPENREDEVCVCRMLMDNIVSEDVYELDL | C-HuFc_His6 |
| | WAGNQLLWNSSFKPSRHVKPRAPQNLTVHAISHTWLLTW | |
| | SNPYPLKNHLWSELTYLVNISKEDDPTDFKIYNVTYMDP | |
| | TLRVTASTLKSRATYSARVKARAQNYNSTWSEWSPSTTW | |
| | HNYYEQPLEQRGGGSGGGSENLYFQGPKSCDKTHTCPPC | |
| | PAPELLGGPSVFLFPPKPKDTLMISRTPEVTCVVVDVSH | |
| | EDPEVKFNWYVDGVEVHNAKTKPREEQYNSTYRVVSVLT | |
| | VLHQDWLNGKEYKCKVSNKALPAPIEKTISKAKGQPREP | |
| | QVYTLPPSRDELTKNQVSLTCLVKGFYPSDIAVEWESNG | |
| | QPENNYKTTPPVLDSDGSFFLYSKLTVDKSRWQQGNVFS | |
| | CSVMHEALHNHYTQKSLSLSPGKHHHHHH | |
| 114 | MGWLCSGLLFPVSCLVLLQVASSIKVLGEPTCFSDYIRT | Murine IL4R-ECD_ |
| | STCEWFLDSAVDCSSQLCLHYRLMFFEFSENLTCIPRNS | C-HuFc_His6 with |
| | ASTVCVCHMEMNRPVQSDRYQMELWAEHRQLWQGSFSPS | leader |
| | GNVKPLAPDNLTLHTNVSDEWLLTWNNLYPSNNLLYKDL | |
| | ISMVNISREDNPAEFIVYNVTYKEPRLSFPINILMSGVY | |
| | YTARVRVRSQILTGTWSEWSPSITWYNHFQLPLIQRLPL | |
| | GVTISCLCIPLFCLFCYFSITKIKKIWGSENLYFQGPKS | |
| | CDKTHTCPPCPAPELLGGPSVFLFPPKPKDTLMISRTPE | |
| | VTCVVVDVSHEDPEVKFNWYVDGVEVHNAKTKPREEQYN | |
| | STYRVVSVLTVLHQDWLNGKEYKCKVSNKALPAPIEKTI | |
| | SKAKGQPREPQVYTLPPSRDELTKNQVSLTCLVKGFYPS | |
| | DIAVEWESNGQPENNYKTTPPVLDSDGSFFLYSKLTVDK | |
| | SRWQQGNVFSCSVMHEALHNHYTQKSLSLSPGKHHHHHH | |
| 115 | IKVLGEPTCFSDYIRTSTCEWFLDSAVDCSSQLCLHYRL | Murine IL4R-ECD_ |
| | MFFEFSENLTCIPRNSASTVCVCHMEMNRPVQSDRYQME | C-HuFc_His6 |
| | LWAEHRQLWQGSFSPSGNVKPLAPDNLTLHTNVSDEWLL | |
| | TWNNLYPSNNLLYKDLISMVNISREDNPAEFIVYNVTYK | |
| | EPRLSFPINILMSGVYYTARVRVRSQILTGTWSEWSPSI | |
| | TWYNHFQLPLIQRLPLGVTISCLCIPLFCLFCYFSITKI | |
| | KKIWGSENLYFQGPKSCDKTHTCPPCPAPELLGGPSVFL | |
| | FPPKPKDTLMISRTPEVTCVVVDVSHEDPEVKFNWYVDG | |
| | VEVHNAKTKPREEQYNSTYRVVSVLTVLHQDWLNGKEYK | |
| | CKVSNKALPAPIEKTISKAKGQPREPQVYTLPPSRDELT | |
| | KNQVSLTCLVKGFYPSDIAVEWESNGQPENNYKTTPPVL | |
| | DSDGSFFLYSKLTVDKSRWQQGNVFSCSVMHEALHNHYT | |
| | QKSLSLSPGKHHHHHH | |
| 116 | MGWLCSGLLFPVSCLVLLQVASSGNMKVLQEPTCVSDYM | Human IL4R-ECD_ |
| | SISTCEWKMNGPTNCSTELRLLYQLVFLLSEAHTCIPEN | C-HuFc_His6 |
| | NGGAGCVCHLLMDDVVSADNYTLDLWAGQQLLWKGSFKP | with leader |
| | SEHVKPRAPGNLTVHTNVSDTLLLTWSNPYPPDNYLYNH | |
| | LTYAVNIWSENDPADFRIYNVTYLEPSLRIAASTLKSGI | |
| | SYRARVRAWAQCYNTTWSEWSPSTKWHNSYREPFEQHGS | |
| | ENLYFQGPKSCDKTHTCPPCPAPELLGGPSVFLFPPKPK | |
| | DTLMISRTPEVTCVVVDVSHEDPEVKFNWYVDGVEVHNA | |
| | KTKPREEQYNSTYRVVSVLTVLHQDWLNGKEYKCKVSNK | |
| | ALPAPIEKTISKAKGQPREPQVYTLPPSRDELTKNQVSL | |
| | TCLVKGFYPSDIAVEWESNGQPENNYKTTPPVLDSDGSF | |
| | FLYSKLTVDKSRWQQGNVFSCSVMHEALHNHYTQKSLSL | |
| | SPGKHHHHHH | |
| 117 | GNMKVLQEPTCVSDYMSISTCEWKMNGPTNCSTELRLLY | Human IL4R-ECD_ |
| | QLVFLLSEAHTCIPENNGGAGCVCHLLMDDVVSADNYTL | C-HuFc_His6 |
| | DLWAGQQLLWKGSFKPSEHVKPRAPGNLTVHTNVSDTLL | |
| | LTWSNPYPPDNYLYNHLTYAVNIWSENDPADFRIYNVTY | |
| | LEPSLRIAASTLKSGISYRARVRAWAQCYNTTWSEWSPS | |
| | TKWHNSYREPFEQHGSENLYFQGPKSCDKTHTCPPCPAP | |
| | ELLGGPSVFLFPPKPKDTLMISRTPEVTCVVVDVSHEDP | |
| | EVKFNWYVDGVEVHNAKTKPREEQYNSTYRVVSVLTVLH | |
| | QDWLNGKEYKCKVSNKALPAPIEKTISKAKGQPREPQVY | |
| | TLPPSRDELTKNQVSLTCLVKGFYPSDIAVEWESNGQPE | |
| | NNYKTTPPVLDSDGSFFLYSKLTVDKSRWQQGNVFSCSV | |
| | MHEALHNHYTQKSLSLSPGKHHHHHH | |
| 118 | MGLTSQLIPTLVCLLALTSTFVHGHNFNITIKEIIKMLN | Canine IL4 precursor |
| | ILTARNDSCMELTVKDVFTAPKNTSDKEIFCRAATVLRQ | NCBI Ref: |
| | IYTHNCSNRYLRGLYRNLSSMANKTCSMNEIKKSTLKDF | NP_001003159.1 |
| | LERLKVIMQKKYYRH | |
| 119 | MGLTYQLIPALVCLLAFTSTFVHGQNFNNTLKEIIKILN | Feline IL4 precursor |
| | ILTARNDSCMELTVMDVLAAPKNTSDKEIFCRATTVLRQ | UniProtKB/Swiss-Prot |
| | IYTHHNCSTKFLKGLDRNLSSMANRTCSVNEVKKCTLKD | Ref: P55030.1 |
| | FLERLKAIMQKKYSKH | |
| 120 | MGLTYQLIPALVCLLACTSNFIQGCKYDITLQEIIKTLN | Equine IL4 precursor |
| | NLTDGKGKNSCMELTVADAFAGPKNTDGKEICRAAKVLQ | NCBI Ref: |
| | QLYKRHDRSLIKECLSGLDRNLKGMANGTCCTVNEAKKS | NP_001075988.1 |
| | TLKDFLERLKTIMKEKYSKC | |
| 121 | MGLTSQLIPTLVCLLALTSTFVHGHNFNITIKEIIKMLN | Canine IL4 precursor |
| | ILTARNDSCMELTVKDVFTAPKNTSDKEIFCRAATVLRQ | NCBI Ref: |
| | IYTHNCSNRYLRGLYRNLSSMANKTCSMNEIKKSTLKDF | NP_001003159.1 |
| | LERLKVIMQKKYYRH | |
| 122 | MDLTSQLIPALVCLLAFTSTFVHGQNFNNTLKEIIKILN | Feline IL4 precursor |
| | ILTARNDSCMELTVMDVLAAPKNTSDKEIFCRATTVLRQ | NCBI Ref: |
| | IYTHHNCSTKFLKGLDRNLSSMANRTCSVNEVKKCTLKD | NP_001036804.1 |
| | FLERLKAIMQKKYSKH | |
| 123 | MGLISQLIPALVCLLACTSNFIQGCKYDITLQEIIKTLN | Predicted Equine IL4 |
| | NLTDGKGKNSCMELTVADAFAGPKNTDGKEICRAAKVLQ | precursor |
| | QLYKRHDRSLIKECLSGLDRNLKGMANGTCCTVNEAKKS | NCBI Ref: |
| | TLKDFLERLKTIMKEKYSKCQS | XP_008536927.1 |
| 124 | MGLTSQLIPTLVCLLALTSTFVHGSSHHHHHHSSGLVPR | Canine IL4_N-His6 with |
| | GSHMHNFNITIKEIIKMLNILTARNDSCMELTVKDVFTA | leader |
| | PKNTSDKEIFCRAATVLRQIYTHNCSNRYLRGLYRNLSS | |
| | MANKTCSMNEIKKSTLKDFLERLKVIMQKKYYRH | |
| 125 | SHHHHHHSSGLVPRGSHMHNFNITIKEIIKMLNILTARN | Canine IL4_N-His6 |
| | DSCMELTVKDVFTAPKNTSDKEIFCRAATVLRQIYTHNC | |
| | SNRYLRGLYRNLSSMANKTCSMNEIKKSTLKDFLERLKV | |
| | IMQKKYYRH | |
| 126 | MGLTSQLIPTLVCLLALTSTFVHGHNFNITIKEIIKMLN | Canine IL4_C-His6 with |
| | ILTARNDSCMELTVKDVFTAPKNTSDKEIFCRAATVLRQ | leader |
| | IYTHNCSNRYLRGLYRNLSSMANKTCSMNEIKKSTLKDF | |
| | LERLKVIMQKKYYRHHHHHH | |
| 127 | HNFNITIKEIIKMLNILTARNDSCMELTVKDVFTAPKNT | Canine IL4_C-His6 |
| | SDKEIFCRAATVLRQIYTHNCSNRYLRGLYRNLSSMANK | |
| | TCSMNEIKKSTLKDFLERLKVIMQKKYYRGSGSHHHHHH | |
| 128 | MDLTSQLIPALVCLLAFTSTFVHGQNFNNTLKEIIKILN | Feline IL4_C-His6 with |
| | ILTARNDSCMELTVMDVLAAPKNTSDKEIFCRATTVLRQ | leader |
| | IYTHHNCSTKFLKGLDRNLSSMANRTCSVNEVKKCTLKD | |
| | FLERLKAIMQKKYSKHGSGSHHHHHH | |
| 129 | QNFNNTLKEIIKTLNILTARNDSCMELTVMDVLAAPKNT | Feline IL4_C-His6 |
| | SDKEIFCRATTVLRQIYTHHNCSTKFLKGLDRNLSSMAN | |
| | RTCSVNEVKKCTLKDFLERLKAIMQKKYSKHGSGSHHHH | |
| | HH | |
| 130 | MGLISQLIPALVCLLACTSNFIQGCKYDITLQEIIKTLN | Equine IL4_C-His6 with |
| | NLTDGKGKNSCMELTVADAFAGPKNTDGKEICRAAKVLQ | leader |
| | QLYKRHDRSLIKECLSGLDRNLKGMANGTCCTVNEAKKS | |
| | TLKDFLERLKTIMKEKYSKCQGSGSHHHHHH | |
| 131 | CKYDITLQEIIKTLNNLTDGKGKNSCMELTVADAFAGPK | Equine IL4_C-His6 |
| | NTDGKEICRAAKVLQQLYKRHDRSLIKECLSGLDRNLKG | |
| | MANGTCCTVNEAKKSTLKDFLERLKTIMKEKYSKCQGSG | |
| | SHHHHHH | |
| 132 | MDMRVPAQLLGLLLLWLRGARC | exemplary leader |
| | | sequence |
| 133 | GSVKVLHEPSCFSDYISTSVCQWKMDHPTNCSAELRLSY | Canine/Human IL4R- |
| | QLDFMGSENHTCVPENNGGAGCVCHLLMDDVVSADNYTL | ECD_C-HuFc_His6_ |
| | DLWAGQQLLWKGSFKPSEHVKPRAPGNLTVHTNVSDTLL | Hybrid1 |
| | LTWSNPYPPDNYLYNHLTYAVNIWSENDPADFRIYNVTY | (Hybrid 1) |
| | LEPSLRIAASTLKSGISYRARVRAWAQCYNTTWSEWSPS | Canine IL4R ECD G1- |
| | TKWHNSYREPFEQHGSENLYFQGPKSCDKTHTCPPCPAP | N55 (bold) |
| | ELLGGPSVFLFPPKPKDTLMISRTPEVTCVVVDVSHEDP | Human IL4R ECD N56- |
| | EVKFNWYVDGVEVHNAKTKPREEQYNSTYRVVSVLTVLH | H209 (italic) |
| | QDWLNGKEYKCKVSNKALPAPIEKTISKAKGQPREPQVY | Human Fc_His6 |
| | TLPPSRDELTKNQVSLTCLVKGFYPSDIAVEWESNGQPE | (underline) |
| | NNYKTTPPVLDSDGSFFLYSKLTVDKSRWQQGNVFSCSV | |
| | MHEALHNHYTQKSLSLSPGKHHHHHH | |
| 134 | GNMKVLQEPTCVSDYMSISTCEWKMNGPTNCSTELRLLY | Canine/Human IL4R- |
| | QLVFLLSEAHTCIPENREDSVCVCSMPIDDAVEADVYQL | ECD_C-HuFc_His6_ |
| | DLWAGQQLLWSGSFQPSKHVKPRTPGNLTVHTNVSDTLL | Hybrid2 |
| | LTWSNPYPPDNYLYNHLTYAVNIWSENDPADFRIYNVTY | (Hybrid 2) |
| | LEPSLRIAASTLKSGISYRARVRAWAQCYNTTWSEWSPS | Human IL4R ECD G1- |
| | TKWHNSYREPFEQHGSENLYFQGPKSCDKTHTCPPCPAP | N55 and T110-H209 |
| | ELLGGPSVFLFPPKPKDTLMISRTPEVTCVVVDVSHEDP | (italic) |
| | EVKFNWYVDGVEVHNAKTKPREEQYNSTYRVVSVLTVLH | Canine IL4R ECD R56- |
| | QDWLNGKEYKCKVSNKALPAPIEKTISKAKGQPREPQVY | H109 (bold) |
| | TLPPSRDELTKNQVSLTCLVKGFYPSDIAVEWESNGQPE | Human Fc_His6 |
| | NNYKTTPPVLDSDGSFFLYSKLTVDKSRWQQGNVFSCSV | (underline) |
| | MHEALHNHYTQKSLSLSPGKHHHHHH | |
| 135 | GNMKVLQEPTCVSDYMSISTCEWKMNGPTNCSTELRLLY | Canine/Human IL4R- |
| | QLVFLLSEAHTCIPENNGGAGCVCHLLMDDVVSADNYTL | ECD_C-HuFc_His6_ |
| | DLWAGQQLLWKGSFKPSEHVKPRAPGNLTVHPNISHTWL | Hybrid3 |
| | LMWTNPYPTENHLHSELTYMVNVSNDNDPEDFKVYNVTY | (Hybnd 3) |
| | MGPTLRLAASTLKSGASYSARVRAWAQTYNSTWSDWSPS | Human IL4R ECD G1- |
| | TTWLNYYEPGSENLYFQGPKSCDKTHTCPPCPAPELLGG | H109 (italic) |
| | PSVFLFPPKPKDTLMISRTPEVTCVVVDVSHEDPEVKFN | Canine IL4R ECD |
| | WYVDGVEVHNAKTKPREEQYNSTYRVVSVLTVLHQDWLN | P110-P204 (bold) |
| | GKEYKCKVSNKALPAPIEKTISKAKGQPREPQVYTLPPS | Human Fc_His6 |
| | RDELTKNQVSLTCLVKGFYPSDIAVEWESNGQPENNYKT | (underline) |
| | TPPVLDSDGSFFLYSKLTVDKSRWQQGNVFSCSVMHEAL | |
| | HNHYTQKSLSLSPGKHHHHHH | |
| 136 | GSVKVLHEPSCFSDYISTSVCQWKMDHPTNCSAELRLSY | Canine/Human IL4R- |
| | QLDFMGSENHTCVPENREDSVCVCSMPIDDAVEADVYQL | ECD_C-HuFc_His6_ |
| | DLWAGQQLLWSGSFQPSKHVKPRTPGNLTVHTNVSDTLL | Hybrid4 |
| | LTWSNPYPPDNYLYNHLTYAVNIWSENDPADFRIYNVTY | (Hybrid 4) |
| | LEPSLRIAASTLKSGISYRARVRAWAQCYNTTWSEWSPS | Canine IL4R ECD G1- |
| | TKWHNSYREPFEQHGSENLYFQGPKSCDKTHTCPPCPAP | H109 (bold) |
| | ELLGGPSVFLFPPKPKDTLMISRTPEVTCVVVDVSHEDP | Human IL4R ECD |
| | EVKFNWYVDGVEVHNAKTKPREEQYNSTYRVVSVLTVLH | T110-H209 (italic) |
| | QDWLNGKEYKCKVSNKALPAPIEKTISKAKGQPREPQVY | Human Fc_His6 |
| | TLPPSRDELTKNQVSLTCLVKGFYPSDIAVEWESNGQPE | (underline) |
| | NNYKTTPPVLDSDGSFFLYSKLTVDKSRWQQGNVFSCSV | |
| | MHEALHNHYTQKSLSLSPGKHHHHHH | |
| 137 | GNMKVLQEPTCVSDYMSISTCEWKMNGPTNCSTELRLLY | Canine/Human IL4R- |
| | QLVFLLSEAHTCIPENREDSVCVCSMPIDDAVEADVYQL | ECD_C-HuFc_His6_ |
| | DLWAGQQLLWSGSFQPSKHVKPRTPGNLTVHPNISHTWL | Hybrid5 |
| | LMWTNPYPTENHLHSELTYMVNVSNDNDPEDFKVYNVTY | (Hybrid 5) |
| | MGPTLRLAASTLKSGASYSARVRAWAQTYNSTWSDWSPS | Human IL4R ECD G1- |
| | TTWLNYYEPGSENLYFQGPKSCDKTHTCPPCPAPELLGG | N55 (italic) |
| | PSVFLFPPKPKDTLMISRTPEVTCVVVDVSHEDPEVKFN | Canine IL4R ECD R56- |
| | WYVDGVEVHNAKTKPREEQYNSTYRVVSVLTVLHQDWLN | P204 (bold) |
| | GKEYKCKVSNKALPAPIEKTISKAKGQPREPQVYTLPPS | Human Fc_His6 |
| | RDELTKNQVSLTCLVKGFYPSDIAVEWESNGQPENNYKT | (underline) |
| | TPPVLDSDGSFFLYSKLTVDKSRWQQGNVFSCSVMHEAL | |
| | HNHYTQKSLSLSPGKHHHHHH | |
| 138 | GSVKVLHEPSCFSDYISTSVCQWKMDHPTNCSAELRLSY | Canine/Human IL4R- |
| | QLDFMGSENHTCVPENNGGAGCVCHLLMDDVVSADNYTL | ECD_C-HuFc_His6_ |
| | DLWAGQQLLWKGSFKPSEHVKPRAPGNLTVHPNISHTWL | Hybrid6 |
| | LMWTNPYPTENHLHSELTYMVNVSNDNDPEDFKVYNVTY | (Hybrid 6) |
| | MGPTLRLAASTLKSGASYSARVRAWAQTYNSTWSDWSPS | Canine IL4R ECD G1- |
| | TTWLNYYEPGSENLYFQGPKSCDKTHTCPPCPAPELLGG | N55, P110-P204 (bold) |
| | PSVFLFPPKPKDTLMISRTPEVTCVVVDVSHEDPEVKFN | Human IL4R ECD N56- |
| | WYVDGVEVHNAKTKPREEQYNSTYRVVSVLTVLHQDWLN | H109 (italic) |
| | GKEYKCKVSNKALPAPIEKTISKAKGQPREPQVYTLPPS | Human Fc_His6 |
| | RDELTKNQVSLTCLVKGFYPSDIAVEWESNGQPENNYKT | (underline) |
| | TPPVLDSDGSFFLYSKLTVDKSRWQQGNVFSCSVMHEAL | |
| | HNHYTQKSLSLSPGKHHHHHH | |
| 139 | GNMKVLQEPTCVSDYMSISTCEWKMNGPTNCSAELRLSY | Canine/Human IL4R- |
| | QLDFMGSENHTCVPENREDSVCVCSMPIDDAVEADVYQL | ECD_C-HuFc_His6_ |
| | DLWAGQQLLWSGSFQPSKHVKPRTPGNLTVHPNISHTWL | Hybrid7 |
| | LMWTNPYPTENHLHSELTYMVNVSNDNDPEDFKVYNVTY | (Hybrid 7) |
| | MGPTLRLAASTLKSGASYSARVRAWAQTYNSTWSDWSPS | Human IL4R ECD G1- |
| | TTWLNYYEPGSENLYFQGPKSCDKTHTCPPCPAPELLGG | N30 (italic) |
| | PSVFLFPPKPKDTLMISRTPEVTCVVVDVSHEDPEVKFN | Canine IL4R ECD C31- |
| | WYVDGVEVHNAKTKPREEQYNSTYRVVSVLTVLHQDWLN | P204 (bold) |
| | GKEYKCKVSNKALPAPIEKTISKAKGQPREPQVYTLPPS | Human Fc_His6 |
| | RDELTKNQVSLTCLVKGFYPSDIAVEWESNGQPENNYKT | (underline) |
| | TPPVLDSDGSFFLYSKLTVDKSRWQQGNVFSCSVMHEAL | |
| | HNHYTQKSLSLSPGKHHHHHH | |
| 140 | GSVKVLHEPSCFSDYISTSVCQWKMDHPTNCSTELRLLY | Canine/Human IL4R- |
| | QLVFLLSEAHTCIPENREDSVCVCSMPIDDAVEADVYQL | ECD_C-HuFc_His6_ |
| | DLWAGQQLLWSGSFQPSKHVKPRTPGNLTVHPNISHTWL | Fusion8 |
| | LMWTNPYPTENHLHSELTYMVNVSNDNDPEDFKVYNVTY | (Fusion 8) |
| | MGPTLRLAASTLKSGASYSARVRAWAQTYNSTWSDWSPS | Canine IL4R ECD G1- |
| | TTWLNYYEPGSENLYFQGPKSCDKTHTCPPCPAPELLGG | N30 and R56-P204 |
| | PSVFLFPPKPKDTLMISRTPEVTCVVVDVSHEDPEVKFN | (bold) |
| | WYVDGVEVHNAKTKPREEQYNSTYRVVSVLTVLHQDWLN | Human IL4R ECD C31- |
| | GKEYKCKVSNKALPAPIEKTISKAKGQPREPQVYTLPPS | N55 (italic) |
| | RDELTKNQVSLTCLVKGFYPSDIAVEWESNGQPENNYKT | Human Fc_His6 |
| | TPPVLDSDGSFFLYSKLTVDKSRWQQGNVFSCSVMHEAL | (underline) |
| | HNHYTQKSLSLSPGKHHHHHH | |
| 141 | GSVKVLHEPSCFSDYISTSVCQWKMDHPTNCSTELRLLY | Canine/Human IL4R- |
| | QLDFMGSENHTCVPENREDSVCVCSMPIDDAVEADVYQL | ECD_C-HuFc_His6_ |
| | DLWAGQQLLWSGSFQPSKHVKPRTPGNLTVHPNISHTWL | Hybrid9 |
| | LMWTNPYPTENHLHSELTYMVNVSNDNDPEDFKVYNVTY | (HYbnd 9) |
| | MGPTLRLAASTLKSGASYSARVRAWAQTYNSTWSDWSPS | Canine IL4R ECD G1- |
| | TTWLNYYEPGSENLYFQGPKSCDKTHTCPPCPAPELLGG | N30 and D42-P204 |
| | PSVFLFPPKPKDTLMISRTPEVTCVVVDVSHEDPEVKFN | (bold) |
| | WYVDGVEVHNAKTKPREEQYNSTYRVVSVLTVLHQDWLN | Human IL4R ECD C31- |
| | GKEYKCKVSNKALPAPIEKTISKAKGQPREPQVYTLPPS | L41 (italic) |
| | RDELTKNQVSLTCLVKGFYPSDIAVEWESNGQPENNYKT | Human Fc_His6 |
| | TPPVLDSDGSFFLYSKLTVDKSRWQQGNVFSCSVMHEAL | (underline) |
| | HNHYTQKSLSLSPGKHHHHHH | |
| 142 | GSVKVLHEPSCFSDYISTSVCQWKMDHPTNCSAELRLSY | Canine/Human IL4R- |
| | QLVFLLSEAHTCIPENREDSVCVCSMPIDDAVEADVYQL | ECD_C-HuFc_His6_ |
| | DLWAGQQLLWSGSFQPSKHVKPRTPGNLTVHPNISHTWL | Hybrid10 |
| | LMWTNPYPTENHLHSELTYMVNVSNDNDPEDFKVYNVTY | (Hybrid 10) |
| | MGPTLRLAASTLKSGASYSARVRAWAQTYNSTWSDWSPS | Canine IL4R ECD G1- |
| | TTWLNYYEPGSENLYFQGPKSCDKTHTCPPCPAPELLGG | L41 and R56-P204 |
| | PSVFLFPPKPKDTLMISRTPEVTCVVVDVSHEDPEVKFN | (bold) |
| | WYVDGVEVHNAKTKPREEQYNSTYRVVSVLTVLHQDWLN | Human IL4R ECD V42- |
| | GKEYKCKVSNKALPAPIEKTISKAKGQPREPQVYTLPPS | N55 (italic) |
| | RDELTKNQVSLTCLVKGFYPSDIAVEWESNGQPENNYKT | Human Fc_His6 |
| | TPPVLDSDGSFFLYSKLTVDKSRWQQGNVFSCSVMHEAL | (underline) |
| | HNHYTQKSLSLSPGKHHHHHH | |
| 143 | GSVKVLHEPSCFSDYISTSVCQWKMDHPTNCSAELRLSY | Canine/Human IL4R- |
| | QLDFMGSENHTCVPENNGGAGCVCHLLMDDVVEADVYQL | ECD_C-HuFc_His6_ |
| | DLWAGQQLLWSGSFQPSKHVKPRTPGNLTVHPNISHTWL | Hybrid 11 |
| | LMWTNPYPTENHLHSELTYMVNVSNDNDPEDFKVYNVTY | (Hybrid 11) |
| | MGPTLRLAASTLKSGASYSARVRAWAQTYNSTWSDWSPS | Canine IL4R ECD G1- |
| | TTWLNYYEPGSENLYFQGPKSCDKTHTCPPCPAPELLGG | N55 and E72-P204 |
| | PSVFLFPPKPKDTLMISRTPEVTCVVVDVSHEDPEVKFN | (bold) |
| | WYVDGVEVHNAKTKPREEQYNSTYRVVSVLTVLHQDWLN | Human IL4R ECD N56- |
| | GKEYKCKVSNKALPAPIEKTISKAKGQPREPQVYTLPPS | V71 (italic) |
| | RDELTKNQVSLTCLVKGFYPSDIAVEWESNGQPENNYKT | Human Fc_His6 |
| | TPPVLDSDGSFFLYSKLTVDKSRWQQGNVFSCSVMHEAL | (underline) |
| | HNHYTQKSLSLSPGKHHHHHH | |
| 144 | GSVKVLHEPSCFSDYISTSVCQWKMDHPTNCSAELRLSY | Canine/Human IL4R- |
| | QLDFMGSENHTCVPENREDSVCVCSMPIDDAVSADNYTL | ECD_C-HuFc_His6_ |
| | DLWAGQQLLWKGSFQPSKHVKPRTPGNLTVHPNISHTWL | Hybrid12 |
| | LMWTNPYPTENHLHSELTYMVNVSNDNDPEDFKVYNVTY | (Hybrid 12) |
| | MGPTLRLAASTLKSGASYSARVRAWAQTYNSTWSDWSPS | Canine IL4R ECD G1- |
| | TTWLNYYEPGSENLYFQGPKSCDKTHTCPPCPAPELLGG | V71 and G90-P204 |
| | PSVFLFPPKPKDTLMISRTPEVTCVVVDVSHEDPEVKFN | (bold) |
| | WYVDGVEVHNAKTKPREEQYNSTYRVVSVLTVLHQDWLN | Human IL4R ECD S72- |
| | GKEYKCKVSNKALPAPIEKTISKAKGQPREPQVYTLPPS | K89 (italic) |
| | RDELTKNQVSLTCLVKGFYPSDIAVEWESNGQPENNYKT | Human Fc_His6 |
| | TPPVLDSDGSFFLYSKLTVDKSRWQQGNVFSCSVMHEAL | (underline) |
| | HNHYTQKSLSLSPGKHHHHHH | |
| 145 | GSVKVLHEPSCFSDYISTSVCQWKMDHPTNCSAELRLSY | Canine/Human IL4R- |
| | QLDFMGSENHTCVPENREDSVCVCSMPIDDAVEADVYQL | ECD_C-HuFc_His6_ |
| | DLWAGQQLLWSGSFKPSEHVKPRAPGNLTVHPNISHTWL | Hybrid13 |
| | LMWTNPYPTENHLHSELTYMVNVSNDNDPEDFKVYNVTY | (Hybrid 13) |
| | MGPTLRLAASTLKSGASYSARVRAWAQTYNSTWSDWSPS | Canine IL4R ECD G1- |
| | TTWLNYYEPGSENLYFQGPKSCDKTHTCPPCPAPELLGG | S89 and P110-P204 |
| | PSVFLFPPKPKDTLMISRTPEVTCVVVDVSHEDPEVKFN | (bold) |
| | WYVDGVEVHNAKTKPREEQYNSTYRVVSVLTVLHQDWLN | Human IL4R ECD G90- |
| | GKEYKCKVSNKALPAPIEKTISKAKGQPREPQVYTLPPS | H109 (italic) |
| | RDELTKNQVSLTCLVKGFYPSDIAVEWESNGQPENNYKT | Human Fc_His6 |
| | TPPVLDSDGSFFLYSKLTVDKSRWQQGNVFSCSVMHEAL | (underline) |
| | HNHYTQKSLSLSPGKHHHHHH | |
| 146 | GSVKVLHEPSCFSDYISTSVCQWKMDHPTNCSAELRLSY | Canine/Human IL4R- |
| | QLDFMGSENHTCVPENREDSVCVCSMPIDDVVSADNYTL | ECD_C-HuFc_His6_ |
| | DLWAGQQLLWKGSFKPSKHVKPRTPGNLTVHPNISHTWL | Hybrid14 |
| | LMWTNPYPTENHLHSELTYMVNVSNDNDPEDFKVYNVTY | (Hybrid 14) |
| | MGPTLRLAASTLKSGASYSARVRAWAQTYNSTWSDWSPS | Canine IL4R ECD G1- |
| | TTWLNYYEPGSENLYFQGPKSCDKTHTCPPCPAPELLGG | 167 and S95-P204 (bold) |
| | PSVFLFPPKPKDTLMISRTPEVTCVVVDVSHEDPEVKFN | Human IL4R ECD D68- |
| | WYVDGVEVHNAKTKPREEQYNSTYRVVSVLTVLHQDWLN | P94 (italic) |
| | GKEYKCKVSNKALPAPIEKTISKAKGQPREPQVYTLPPS | Human Fc_His6 |
| | RDELTKNQVSLTCLVKGFYPSDIAVEWESNGQPENNYKT | (underline) |
| | TPPVLDSDGSFFLYSKLTVDKSRWQQGNVFSCSVMHEAL | |
| | HNHYTQKSLSLSPGKHHHHHH | |
| 147 | GSVKVLHEPSCFSDYISTSVCQWKMDHPTNCSTELRLSY | Canine IL4R-ECD_ |
| | QLDFMGSENHTCVPENREDSVCVCSMPIDDAVEADVYQL | C-HuFc_His6.A33T |
| | DLWAGQQLLWSGSFQPSKHVKPRTPGNLTVHPNISHTWL | (Mutant 1) |
| | LMWTNPYPTENHLHSELTYMVNVSNDNDPEDFKVYNVTY | |
| | MGPTLRLAASTLKSGASYSARVRAWAQTYNSTWSDWSPS | |
| | TTWLNYYEPGSENLYFQGPKSCDKTHTCPPCPAPELLGG | |
| | PSVFLFPPKPKDTLMISRTPEVTCVVVDVSHEDPEVKFN | |
| | WYVDGVEVHNAKTKPREEQYNSTYRVVSVLTVLHQDWLN | |
| | GKEYKCKVSNKALPAPIEKTISKAKGQPREPQVYTLPPS | |
| | RDELTKNQVSLTCLVKGFYPSDIAVEWESNGQPENNYKT | |
| | TPPVLDSDGSFFLYSKLTVDKSRWQQGNVFSCSVMHEAL | |
| | HNHYTQKSLSLSPGKHHHHHH | |
| 148 | GSVKVLHEPSCFSDYISTSVCQWKMDHPTNCSAELRLSY | Canine IL4R-ECD |
| | QLDFAGSENHTCVPENREDSVCVCSMPIDDAVEADVYQL | C-HuFc_His6.M44A |
| | DLWAGQQLLWSGSFQPSKHVKPRTPGNLTVHPNISHTWL | (Mutant 2) |
| | LMWTNPYPTENHLHSELTYMVNVSNDNDPEDFKVYNVTY | |
| | MGPTLRLAASTLKSGASYSARVRAWAQTYNSTWSDWSPS | |
| | TTWLNYYEPGSENLYFQGPKSCDKTHTCPPCPAPELLGG | |
| | PSVFLFPPKPKDTLMISRTPEVTCVVVDVSHEDPEVKFN | |
| | WYVDGVEVHNAKTKPREEQYNSTYRVVSVLTVLHQDWLN | |
| | GKEYKCKVSNKALPAPIEKTISKAKGQPREPQVYTLPPS | |
| | RDELTKNQVSLTCLVKGFYPSDIAVEWESNGQPENNYKT | |
| | TPPVLDSDGSFFLYSKLTVDKSRWQQGNVFSCSVMHEAL | |
| | HNHYTQKSLSLSPGKHHHHHH | |
| 149 | GSVKVLHEPSCFSDYISTSVCQWKMDHPTNCSAELRLSY | Canine IL4R-ECD_ |
| | QLDFMASENHTCVPENREDSVCVCSMPIDDAVEADVYQL | C-HuFc_His6.G45A |
| | DLWAGQQLLWSGSFQPSKHVKPRTPGNLTVHPNISHTWL | (Mutant 3) |
| | LMWTNPYPTENHLHSELTYMVNVSNDNDPEDFKVYNVTY | |
| | MGPTLRLAASTLKSGASYSARVRAWAQTYNSTWSDWSPS | |
| | TTWLNYYEPGSENLYFQGPKSCDKTHTCPPCPAPELLGG | |
| | PSVFLFPPKPKDTLMISRTPEVTCVVVDVSHEDPEVKFN | |
| | WYVDGVEVHNAKTKPREEQYNSTYRVVSVLTVLHQDWLN | |
| | GKEYKCKVSNKALPAPIEKTISKAKGQPREPQVYTLPPS | |
| | RDELTKNQVSLTCLVKGFYPSDIAVEWESNGQPENNYKT | |
| | TPPVLDSDGSFFLYSKLTVDKSRWQQGNVFSCSVMHEAL | |
| | HNHYTQKSLSLSPGKHHHHHH | |
| 150 | GSVKVLHEPSCFSDYISTSVCQWKMDHPTNCSAELRLSY | Canine IL4R-ECD_ |
| | QLDFMGSEAHTCVPENREDSVCVCSMPIDDAVEADVYQL | C-HuFc_His6.N48A |
| | DLWAGQQLLWSGSFQPSKHVKPRTPGNLTVHPNISHTWL | (Mutant 4) |
| | LMWTNPYPTENHLHSELTYMVNVSNDNDPEDFKVYNVTY | |
| | MGPTLRLAASTLKSGASYSARVRAWAQTYNSTWSDWSPS | |
| | TTWLNYYEPGSENLYFQGPKSCDKTHTCPPCPAPELLGG | |
| | PSVFLFPPKPKDTLMISRTPEVTCVVVDVSHEDPEVKFN | |
| | WYVDGVEVHNAKTKPREEQYNSTYRVVSVLTVLHQDWLN | |
| | GKEYKCKVSNKALPAPIEKTISKAKGQPREPQVYTLPPS | |
| | RDELTKNQVSLTCLVKGFYPSDIAVEWESNGQPENNYKT | |
| | TPPVLDSDGSFFLYSKLTVDKSRWQQGNVFSCSVMHEAL | |
| | HNHYTQKSLSLSPGKHHHHHH | |
| 151 | GSVKVLHEPSCFSDYISTSVCQWKMDHPTNCSAELRLAY | Canine IL4R-ECD_ |
| | QLDFMGSENHTCVPENREDSVCVCSMPIDDAVEADVYQL | C-HuFc_His6.S38A |
| | DLWAGQQLLWSGSFQPSKHVKPRTPGNLTVHPNISHTWL | (Mutant 5) |
| | LMWTNPYPTENHLHSELTYMVNVSNDNDPEDFKVYNVTY | |
| | MGPTLRLAASTLKSGASYSARVRAWAQTYNSTWSDWSPS | |
| | TTWLNYYEPGSENLYFQGPKSCDKTHTCPPCPAPELLGG | |
| | PSVFLFPPKPKDTLMISRTPEVTCVVVDVSHEDPEVKFN | |
| | WYVDGVEVHNAKTKPREEQYNSTYRVVSVLTVLHQDWLN | |
| | GKEYKCKVSNKALPAPIEKTISKAKGQPREPQVYTLPPS | |
| | RDELTKNQVSLTCLVKGFYPSDIAVEWESNGQPENNYKT | |
| | TPPVLDSDGSFFLYSKLTVDKSRWQQGNVFSCSVMHEAL | |
| | HNHYTQKSLSLSPGKHHHHHH | |
| 152 | GSVKVLHEPSCFSDYISTSVCQWKMDHPTNCSAELRLSY | Canine IL4R-ECD_ |
| | QLAFMGSENHTCVPENREDSVCVCSMPIDDAVEADVYQL | C-HuFc_His6.D42A |
| | DLWAGQQLLWSGSFQPSKHVKPRTPGNLTVHPNISHTWL | (Mutant 6) |
| | LMWTNPYPTENHLHSELTYMVNVSNDNDPEDFKVYNVTY | |
| | MGPTLRLAASTLKSGASYSARVRAWAQTYNSTWSDWSPS | |
| | TTWLNYYEPGSENLYFQGPKSCDKTHTCPPCPAPELLGG | |
| | PSVFLFPPKPKDTLMISRTPEVTCVVVDVSHEDPEVKFN | |
| | WYVDGVEVHNAKTKPREEQYNSTYRVVSVLTVLHQDWLN | |
| | GKEYKCKVSNKALPAPIEKTISKAKGQPREPQVYTLPPS | |
| | RDELTKNQVSLTCLVKGFYPSDIAVEWESNGQPENNYKT | |
| | TPPVLDSDGSFFLYSKLTVDKSRWQQGNVFSCSVMHEAL | |
| | HNHYTQKSLSLSPGKHHHHHH | |
| 153 | GSVKVLHEPSCFSDYISTSVCQWKMDHPTNCSAELRLSY | Canine IL4R-ECD_ |
| | QLDFMGSENATCVPENREDSVCVCSMPIDDAVEADVYQL | C-HuFc_His6.H49A |
| | DLWAGQQLLWSGSFQPSKHVKPRTPGNLTVHPNISHTWL | (Mutant 7) |
| | LMWTNPYPTENHLHSELTYMVNVSNDNDPEDFKVYNVTY | |
| | MGPTLRLAASTLKSGASYSARVRAWAQTYNSTWSDWSPS | |
| | TTWLNYYEPGSENLYFQGPKSCDKTHTCPPCPAPELLGG | |
| | PSVFLFPPKPKDTLMISRTPEVTCVVVDVSHEDPEVKFN | |
| | WYVDGVEVHNAKTKPREEQYNSTYRVVSVLTVLHQDWLN | |
| | GKEYKCKVSNKALPAPIEKTISKAKGQPREPQVYTLPPS | |
| | RDELTKNQVSLTCLVKGFYPSDIAVEWESNGQPENNYKT | |
| | TPPVLDSDGSFFLYSKLTVDKSRWQQGNVFSCSVMHEAL | |
| | HNHYTQKSLSLSPGKHHHHHH | |
| 154 | MALWLTVVIALTCLGGLASPSPVTPSPTLKELIEELVNI | Canine IL13 precursor |
| | TQNQASLCNGSMVWSVNLTAGMYCAALESLINVSDCSAI | NCBI Ref: |
| | QRTQRMLKALCSQKPAAGQISSERSRDTKIEVIQLVKNL | NP_001003384 |
| | LTYVRGVYRHGNFR | |
| 155 | MWFLDSTRQSGDQGGRRHTWPIKATARGQGHKPLSLGQP | Feline IL13 precursor |
| | TCPLLAPPVLALGSMALWLTVVIALTCLGGLASPGPHSR | NCBI Ref: |
| | RELKELIEELVNITQNQVSLCNGSMVWSVNLTTGMQYCA | XP_006927648 |
| | ALESLINVSDCTAIQRTQRMLKALCTQKPSAGQTASERS | |
| | RDTKIEVIQLVKNLLNHLRRNFRHGNFK | |
| 156 | MALWLTVVIALTCLGGLASPSPVTPSPTLKELIEELVNI | Canine IL13_C-His6 |
| | TQNQASLCNGSMVWSVNLTAGMYCAALESLINVSDCSAI | with leader |
| | QRTQRMLKALCSQKPAAGQISSERSRDTKIEVIQLVKNL | |
| | LTYVRGVYRHGNFRGSHHHHHH | |
| 157 | SPSPVTPSPTLKELIEELVNITQNQASLCNGSMVWSVNL | Canine IL13_C-His6 |
| | TAGMYCAALESLINVSDCSAIQRTQRMLKALCSQKPAAG | |
| | QISSERSRDTKIEVIQLVKNLLTYVRGVYRHGNFRGSHH | |
| | HHHH | |
| 158 | MALWLTVVIALTCLGGLASPGPHSRRELKELIEELVNIT | Feline IL13_C-His6 |
| | QNQLLQVSLCNGSMVWSVNLTTGMQYCAALESLINVSDC | with leader |
| | TAIQRTQRMLKALCTQKPSAGQTASERSRDTKIEVIQLV | |
| | KNLLNHLRRNFRHGNFKGSGSHHHHHH | |
| 159 | SPGPHSRRELKELIEELVNITQNQLLQVSLCNGSMVWSV | Feline IL13_C-His6 |
| | NLTTGMQYCAALESLINVSDCTAIQRTQRMLKALCTQKP | |
| | SAGQTASERSRDTKIEVIQLVKNLLNHLRRNFRHGNFKG | |
| | SGSHHHHHH | |
| 160 | MERPARLCGLWALLLCAAGGRGGGVAAPTETQPPVTNLSVSVE | Canine IL13R |
| | NLCTVIWTWDPPEGASPNCTLRYFSHFDNKQDKKIAPETHRSK | NCBI Ref: |
| | EVPLNERICLQVGSQCSTNESDNPSILVEKCTPPPEGDPESAV | XP_538150.3 |
| | TELQCVWHNLSYMKCIWLPGRNTSPDTNYTLYYWHSSLGKILQ | |
| | CEDIYREGQHIGCSFALTNLKDSSFEQHSVQIVVKDNAGKIRP | |
| | SFNIVPLTSHVKPDPPHIKRLFFQNGNLYVQWKNPQNFYSRCL | |
| | SYQVEVNNSQTETNDIFYVEEAKCQNSEFEGNLEGTICFMVPG | |
| | VLPDTLNIVRIRVRTNKLCYEDDKLWSNWSQAMSIGENTDPTF | |
| | YITMLLATPVIVAGAIIVLLLYLKRLKIIIFPPIPDPGKIFKE | |
| | MFGDQNDDTLHWRKYDIYEKQTKEETDSVVLIENLKKASQ | |
| 161 | TETQPPVTNLSVSVENLCTVIWTWDPPEGASPNCTLRYFSHFD | Canine IL13R ECD |
| | NKQDKKIAPETHRSKEVPLNERICLQVGSQCSTNESDNPSILV | |
| | EKCTPPPEGDPESAVTELQCVWHNLSYMKCTWLPGRNTSPDTN | |
| | YTLYYWHSSLGKILQCEDIYREGQHIGCSFALTNLKDSSFEQH | |
| | SVQIVVKDNAGKIRPSFNIVPLTSHVKPDPPHIKRLFFQNGNL | |
| | YVQWKNPQNFYSRCLSYQVEVNNSQTETNDIFYVEEAKCQNSE | |
| | FEGNLEGTICFMVPGVLPDTLNIVRIRVRTNKLCYEDDKLWSN | |
| | WSQAMSIGENTDPT | |
| 162 | PVPEPLGGPSVLIFPPKPKDILRITRTPEVTCVVLDLGR | Exemplary wild-type |
| | EDPEVQISWFVDGKEVHTAKTQSREQQFNGTYRVVSVLP | canine IgG-A Fc |
| | IEHQDWLTGKEFKCRVNHIDLPSPIERTISKARGRAHKP | Protein A- |
| | SVYVLPPSPKELSSSDTVSITCLIKDFYPPDIDVEWQSN | C1q- |
| | GQQEPERKHRMTPPQLDEDGSYFLYSKLSVDKSRWQQGD | CD16- |
| | PFTCAVMHETLQNHYTDLSLSHSPGK | |
| 163 | PAPEMLGGPSVFIFPPKPKDTLLIARTPEVTCVVVDLDP | Exemplary wild-type |
| | EDPEVQISWFVDGKQMQTAKTQPREEQFNGTYRVVSVLP | canine IgG-B Fc |
| | IGHQDWLKGKQFTCKVNNKALPSPIERTISKARGQAHQP | Protein A+ |
| | SVYVLPPSREELSKNTVSLTCLIKDFFPPDIDVEWQSNG | C1q+ |
| | QQEPESKYRTTPPQLDEDGSYFLYSKLSVDKSRWQRGDT | CD16+ |
| | FICAVMHEALHNHYTQESLSHSPGK | |
| 164 | PKRENGRVPRPPDCPKCPAPEMLGGPSVFIFPPKPKDTLL | Exemplary wild-type |
| | IARTPEVTCVVVDLDPEDPEVQISWFVDGKQMQTAKTQP | canine IgG-B Fc with |
| | REEQFNGTYRVVSVLPIGHQDWLKGKQFTCKVNNKALPS | hinge |
| | PIERTISKARGQAHQPSVYVLPPSREELSKNTVSLTCLI | Protein A+ |
| | KDFFPPDIDVEWQSNGQQEPESKYRTTPPQLDEDGSYFL | C1q+ |
| | YSKLSVDKSRWQRGDTFICAVMHEALHNHYTQESLSHSP | CD16+ |
| | GK | |
| 165 | PGCGLLGGPSVFIFPPKPKDILVTARTPTVTCVVVDLDP | Exemplary wild-type |
| | ENPEVQISWFVDSKQVQTANTQPREEQSNGTYRVVSVLP | canine IgG-C Fc |
| | IGHQDWLSGKQFKCKVNNKALPSPIEEIISKTPGQAHQP | Protein A- |
| | NVYVLPPSRDEMSKNTVTLTCLVKDFFPPEIDVEWQSNG | C1q+ |
| | QQEPESKYRMTPPQLDEDGSYFLYSKLSVDKSRWQRGDT | CD16+ |
| | FICAVMHEALHNHYTQISLSHSPGK | |
| 166 | AKECECKCNCNNCPCPGCGLLGGPSVFIFPPKPKDILVT | Exemplary wild-type |
| | ARTPTVTCVVVDLDPENPEVQISWFVDSKQVQTANTQPR | canine IgG-C Fc with |
| | EEQSNGTYRVVSVLPIGHQDWLSGKQFKCKVNNKALPSP | hinge |
| | IEEIISKTPGQAHQPNVYVLPPSRDEMSKNTVTLTCLVK | Protein A- |
| | DFFPPEIDVEWQSNGQQEPESKYRMTPPQLDEDGSYFLY | C1q+ |
| | SKLSVDKSRWQRGDTFICAVMHEALHNHYTQISLSHSPG | CD1+ |
| | K | |
| 167 | PVPESLGGPSVFIFPPKPKDILRITRTPEITCVVLDLGR | Exemplary wild-type |
| | EDPEVQISWFVDGKEVHTAKTQPREQQFNSTYRVVSVLP | canine IgG-D Fc |
| | IEHQDWLTGKEFKCRVNHIGLPSPIERTISKARGQAHQP | Protein A- |
| | SVYVLPPSPKELSSSDTVTLTCLIKDFFPPEIDVEWQSN | C1q- |
| | GQPEPESKYHTTAPQLDEDGSYFLYSKLSVDKSRWQQGD | CD16- |
| | TFTCAVMHEALQNHYTDLSLSHSPGK | |
| 168 | PVPEPLGGPSVLIFPPKPKDTLLIARTPEVTCVVLDLGR | Exemplary variant |
| | EDPEVQISWFVDGKEVHTAKTQSREQQFNGTYRVVSVLP | canine IgG-A Fc |
| | IGHQDWLTGKEFKCRVNHIDLPSPIERTISKARGRAHKP | C1q- |
| | SVYVLPPSPKELSSSDTVSITCLIKDFYPPDIDVEWQSN | Protein A+ |
| | GQQEPERKHRMTPPQLDEDGSYFLYSKLSVDKSRWQQGD | I(21)T |
| | PFTCAVMHEALHNHYTDLSLSHSPGK | R(23)L |
| | | T(25)A |
| | | E(80)G |
| | | T(205)A |
| | | Q(207)H |
| 169 | PVPEPLGGPSVLIFPPKPKDTLRITRTPEVTCVVLDLGR | Exemplary variant |
| | EDPEVQISWFVDGKEVHTAKTQSREQQFNGTYRVVSVLP | canine IgG-A Fc |
| | IEHQDWLTGKEFKCRVNHIDLPSPIERTISKARGRAHKP | C1q- |
| | SVYVLPPSPKELSSSDTVSITCLIKDFYPPDIDVEWQSN | Protein A+ |
| | GQQEPERKHRMTPPQLDEDGSYFLYSKLSVDKSRWQQGD | I(21)T |
| | PFTCAVMHETLHNHYTDLSLSHSPGK | Q(207)H |
| 170 | PAPEMLGGPSVFIFPPKPKDTLLIARTPEVTCVVVDLDP | Exemplary variant |
| | EDPEVQISWFVDGKQMQTAKTQPREEQFNGTYRVVSVLP | canine IgG-B Fc |
| | IGHQDWLKGKQFTCRVNNKALPSPIERTISKARGQAHQP | Protein A+ |
| | SVYVLPPSREELSKNTVSLTCLIKDFFPPDIDVEWQSNG | C1q- |
| | QQEPESKYRTTPPQLDEDGSYFLYSKLSVDKSRWQRGDT | K(93)R |
| | FICAVMHEALHNHYTQESLSHSPGK | |
| 171 | PAPEPLGGPSVFIFPPKPKDTLLIARTPEVTCVVVDLDP | Exemplary variant |
| | EDPEVQISWFVDGKQMQTAKTQPREEQFNGTYRVVSVLP | canine IgG-B Fc |
| | IGHQDWLKGKQFTCKVNNKALPSPIERTISKARGQAHQP | Protein A+ |
| | SVYVLPPSREELSKNTVSLTCLIKDFFPPDIDVEWQSNG | C1q+ |
| | QQEPESKYRTTPPQLDEDGSYFLYSKLSVDKSRWQRGDT | CD16- |
| | FICAVMHEALHNHYTQESLSHSPGK | M(5)P |
| 172 | PAPEMLGGPSVFIFPPKPKDTLLIARTPEVTCVVVDLDR | Exemplary variant |
| | EDPEVQISWFVDGKQMQTAKTQPREEQFNGTYRVVSVLP | canine IgG-B Fc |
| | IGHQDWLKGKQFTCKVNNKALPSPIERTISKARGQAHQP | Protein A+ |
| | SVYVLPPSREELSKNTVSLTCLIKDFFPPDIDVEWQSNG | C1q+ |
| | QQEPESKYRTTPPQLDEDGSYFLYSKLSVDKSRWQRGDT | CD16- |
| | FICAVMHEALHNHYTQESLSHSPGK | P(39)R |
| 173 | PAPEMLGGPSVFIFPPKPKDTLLIARTPEVTCVVVDLGP | Exemplary variant |
| | EDPEVQISWFVDGKQMQTAKTQPREEQFNGTYRVVSVLP | canine IgG-B Fc |
| | IGHQDWLKGKQFTCKVNNKALPSPIERTISKARGQAHQP | Protein A+ |
| | SVYVLPPSREELSKNTVSLTCLIKDFFPPDIDVEWQSNG | C1q+ |
| | QQEPESKYRTTPPQLDEDGSYFLYSKLSVDKSRWQRGDT | CD16- |
| | FICAVMHEALHNHYTQESLSHSPGK | D(38)G |
| 174 | PAPEMLGGPSVFIFPPKPKDTLLIARTPEVTCVVVDLDP | Exemplary variant |
| | EDPEVQISWFVDGKQMQTAKTQPREEQFNGTYRVVSVLP | canine IgG-B Fc |
| | IGHQDWLKGKQFTCKVNNIALPSPIERTISKARGQAHQP | Protein A+ |
| | SVYVLPPSREELSKNTVSLTCLIKDFFPPDIDVEWQSNG | C1q+ |
| | QQEPESKYRTTPPQLDEDGSYFLYSKLSVDKSRWQRGDT | CD16- |
| | FICAVMHEALHNHYTQESLSHSPGK | K(97)I |
| 175 | PAPEMLGGPSVFIFPPKPKDTLLIARTPEVTCVVVDLDP | Exemplary variant |
| | EDPEVQISWFVDGKQMQTAKTQPREEQFNGTYRVVSVLP | canine IgG-B Fc |
| | IGHQDWLKGKQFTCKVNNKGLPSPIERTISKARGQAHQP | Protein A+ |
| | SVYVLPPSREELSKNTVSLTCLIKDFFPPDIDVEWQSNG | C1q+ |
| | QQEPESKYRTTPPQLDEDGSYFLYSKLSVDKSRWQRGDT | CD16- |
| | FICAVMHEALHNHYTQESLSHSPGK | A(98)G |
| 176 | PAPEMLGGPSVFIFPPKPKDTLLIARTPEVTCVVVDLGP | Exemplary variant |
| | EDPEVQISWFVDGKQMQTAKTQPREEQFNGTYRVVSVLP | canine IgG-B Fc |
| | IGHQDWLKGKQFTCKVNNIGLPSPIERTISKARGQAHQP | Protein A+ |
| | SVYVLPPSREELSKNTVSLTCLIKDFFPPDIDVEWQSNG | C1q+ |
| | QQEPESKYRTTPPQLDEDGSYFLYSKLSVDKSRWQRGDT | CD16- |
| | FICAVMHEALHNHYTQESLSHSPGK | D(38)G |
| | | K(97)I |
| | | A(98)G |
| 177 | PAPEMLGGPSVFIFPPKPKDTLLIARTPEVTCVVVDLGP | Exemplary variant |
| | EDPEVQISWFVDGKQMQTAKTQPREEQFNGTYRVVSVLP | canine IgG-B Fc |
| | IGHQDWLKGKQFTCRVNNIGLPSPIERTISKARGQAHQP | Protein A+ |
| | SVYVLPPSREELSKNTVSLTCLIKDFFPPDIDVEWQSNG | C1q- |
| | QQEPESKYRTTPPQLDEDGSYFLYSKLSVDKSRWQRGDT | CD16- |
| | FICAVMHEALHNHYTQESLSHSPGK | D(38)G |
| | | K(93)R |
| | | K(97)I |
| | | A(98)G |
| 178 | PAPEPLGGPSVFIFPPKPKDTLLIARTPEVTCVVVDLDR | Exemplary variant |
| | EDPEVQISWFVDGKQMQTAKTQPREEQFNGTYRVVSVLP | canine IgG-B Fc |
| | IGHQDWLKGKQFTCKVNNKALPSPIERTISKARGQAHQP | Protein A+ |
| | SVYVLPPSREELSKNTVSLTCLIKDFFPPDIDVEWQSNG | C1q+ |
| | QQEPESKYRTTPPQLDEDGSYFLYSKLSVDKSRWQRGDT | CD16- |
| | FICAVMHEALHNHYTQESLSHSPGK | M(5)P |
| | | P(39)R |
| 179 | PAPEPLGGPSVFIFPPKPKDTLLIARTPEVTCVVVDLDR | Exemplary variant |
| | EDPEVQISWFVDGKQMQTAKTQPREEQFNGTYRVVSVLP | canine IgG-B Fc |
| | IGHQDWLKGKQFTCRVNNKALPSPIERTISKARGQAHQP | Protein A+ |
| | SVYVLPPSREELSKNTVSLTCLIKDFFPPDIDVEWQSNG | C1q- |
| | QQEPESKYRTTPPQLDEDGSYFLYSKLSVDKSRWQRGDT | CD16- |
| | FICAVMHEALHNHYTQESLSHSPGK | M(5)P |
| | | P(39)R |
| | | K(93)R |
| 180 | PGCGLLGGPSVFIFPPKPKDTLLIARTPTVTCVVVDLDP | Exemplary variant |
| | ENPEVQISWFVDSKQVQTANTQPREEQSNGTYRVVSVLP | canine IgG-C Fc |
| | IGHQDWLSGKQFKCKVNNKALPSPIEEIISKTPGQAHQP | C1q+ |
| | NVYVLPPSRDEMSKNTVTLTCLVKDFFPPEIDVEWQSNG | Protein A+ |
| | QQEPESKYRMTPPQLDEDGSYFLYSKLSVDKSRWQRGDT | I(21)T |
| | FICAVMHEALHNHYTQISLSHSPGK | V(23)L |
| | | T(24)I |
| 181 | PGCGLLGGPSVFIFPPKPKDTLVTARTPTVTCVVVDLDP | Exemplary variant |
| | ENPEVQISWFVDSKQVQTANTQPREEQSNGTYRVVSVLP | canine IgG-C Fc |
| | IGHQDWLSGKQFKCKVNNKALPSPIEEIISKTPGQAHQP | C1q+ |
| | NVYVLPPSRDEMSKNTVTLTCLVKDFFPPEIDVEWQSNG | Protein A+ |
| | QQEPESKYRMTPPQLDEDGSYFLYSKLSVDKSRWQRGDT | I(21)T |
| | FICAVMHEALHNHYTQISLSHSPGK | |
| 182 | PGCGLLGGPSVFIFPPKPKDILVTARTPTVTCVVVDLDP | Exemplary variant |
| | ENPEVQISWFVDSKQVQTANTQPREEQSNGTYRVVSVLP | canine IgG-C Fc |
| | IGHQDWLSGKQFKCRVNNKALPSPIEEIISKTPGQAHQP | Protein A- |
| | NVYVLPPSRDEMSKNTVTLTCLVKDFFPPEIDVEWQSNG | C1q- |
| | QQEPESKYRMTPPQLDEDGSYFLYSKLSVDKSRWQRGDT | K(93)R |
| | FICAVMHEALHNHYTQISLSHSPGK | |
| 183 | PGCGLLGGPSVFIFPPKPKDTLLIARTPTVTCVVVDLDP | Exemplary variant |
| | ENPEVQISWFVDSKQVQTANTQPREEQSNGTYRVVSVLP | canine IgG-C Fc |
| | IGHQDWLSGKQFKCRVNNKALPSPIEEIISKTPGQAHQP | C1q- |
| | NVYVLPPSRDEMSKNTVTLTCLVKDFFPPEIDVEWQSNG | K(93)R |
| | QQEPESKYRMTPPQLDEDGSYFLYSKLSVDKSRWQRGDT | Protein A+ |
| | FICAVMHEALHNHYTQISLSHSPGK | I(21)T |
| | | V(23)L |
| | | T(24)I |
| 184 | PGCGPLGGPSVFIFPPKPKDILVTARTPTVTCVVVDLDP | Exemplary variant |
| | ENPEVQISWFVDSKQVQTANTQPREEQSNGTYRVVSVLP | canine IgG-C Fc |
| | IGHQDWLSGKQFKCKVNNKALPSPIEEIISKTPGQAHQP | Protein A+ |
| | NVYVLPPSRDEMSKNTVTLTCLVKDFFPPEIDVEWQSNG | C1q+ |
| | QQEPESKYRMTPPQLDEDGSYFLYSKLSVDKSRWQRGDT | CD16- |
| | FICAVMHEALHNHYTQISLSHSPGK | L(5)P |
| 185 | PGCGLLGGPSVFIFPPKPKDILVTARTPTVTCVVVDLDR | Exemplary variant |
| | ENPEVQISWFVDSKQVQTANTQPREEQSNGTYRVVSVLP | canine IgG-C Fc |
| | IGHQDWLSGKQFKCKVNNKALPSPIEEIISKTPGQAHQP | Protein A+ |
| | NVYVLPPSRDEMSKNTVTLTCLVKDFFPPEIDVEWQSNG | C1q+ |
| | QQEPESKYRMTPPQLDEDGSYFLYSKLSVDKSRWQRGDT | CD16- |
| | FICAVMHEALHNHYTQISLSHSPGK | P(39)R |
| 186 | PGCGLLGGPSVFIFPPKPKDILVTARTPTVTCVVVDLGP | Exemplary variant |
| | ENPEVQISWFVDSKQVQTANTQPREEQSNGTYRVVSVLP | canine IgG-C Fc |
| | IGHQDWLSGKQFKCKVNNKALPSPIEEIISKTPGQAHQP | Protein A+ |
| | NVYVLPPSRDEMSKNTVTLTCLVKDFFPPEIDVEWQSNG | C1q+ |
| | QQEPESKYRMTPPQLDEDGSYFLYSKLSVDKSRWQRGDT | CD16- |
| | FICAVMHEALHNHYTQISLSHSPGK | D(38)G |
| 187 | PGCGLLGGPSVFIFPPKPKDILVTARTPTVTCVVVDLDP | Exemplary variant |
| | ENPEVQISWFVDSKQVQTANTQPREEQSNGTYRVVSVLP | canine IgG-C Fc |
| | IGHQDWLSGKQFKCKVNNIALPSPIEEIISKTPGQAHQP | Protein A+ |
| | NVYVLPPSRDEMSKNTVTLTCLVKDFFPPEIDVEWQSNG | C1q+ |
| | QQEPESKYRMTPPQLDEDGSYFLYSKLSVDKSRWQRGDT | CD16- |
| | FICAVMHEALHNHYTQISLSHSPGK | K(97)I |
| 188 | PGCGLLGGPSVFIFPPKPKDILVTARTPTVTCVVVDLDP | Exemplary variant |
| | ENPEVQISWFVDSKQVQTANTQPREEQSNGTYRVVSVLP | canine IgG-C Fc |
| | IGHQDWLSGKQFKCKVNNKGLPSPIEEIISKTPGQAHQP | Protein A+ |
| | NVYVLPPSRDEMSKNTVTLTCLVKDFFPPEIDVEWQSNG | C1q+ |
| | QQEPESKYRMTPPQLDEDGSYFLYSKLSVDKSRWQRGDT | CD16- |
| | FICAVMHEALHNHYTQISLSHSPGK | A(98)G |
| 189 | PGCGLLGGPSVFIFPPKPKDILVTARTPTVTCVVVDLGP | Exemplary variant |
| | ENPEVQISWFVDSKQVQTANTQPREEQSNGTYRVVSVLP | canine IgG-C Fc |
| | IGHQDWLSGKQFKCKVNNIGLPSPIEEIISKTPGQAHQP | Protein A+ |
| | NVYVLPPSRDEMSKNTVTLTCLVKDFFPPEIDVEWQSNG | C1q+ |
| | QQEPESKYRMTPPQLDEDGSYFLYSKLSVDKSRWQRGDT | CD16- |
| | FICAVMHEALHNHYTQISLSHSPGK | D(38)G |
| | | K(97)I |
| | | A(98)G |
| 190 | PGCGLLGGPSVFIFPPKPKDILVTARTPTVTCVVVDLGP | Exemplary variant |
| | ENPEVQISWFVDSKQVQTANTQPREEQSNGTYRVVSVLP | canine IgG-C Fc |
| | IGHQDWLSGKQFKCRVNNIGLPSPIEEIISKTPGQAHQP | Protein A+ |
| | NVYVLPPSRDEMSKNTVTLTCLVKDFFPPEIDVEWQSNG | C1q- |
| | QQEPESKYRMTPPQLDEDGSYFLYSKLSVDKSRWQRGDT | CD16- |
| | FICAVMHEALHNHYTQISLSHSPGK | D(38)G |
| | | K(93)R |
| | | K(97)I |
| | | A(98)G |
| 191 | PGCGPLGGPSVFIFPPKPKDILVTARTPTVTCVVVDLDR | Exemplary variant |
| | ENPEVQISWFVDSKQVQTANTQPREEQSNGTYRVVSVLP | canine IgG-C Fc |
| | IGHQDWLSGKQFKCKVNNKALPSPIEEIISKTPGQAHQP | Protein A+ |
| | NVYVLPPSRDEMSKNTVTLTCLVKDFFPPEIDVEWQSNG | C1q+ |
| | QQEPESKYRMTPPQLDEDGSYFLYSKLSVDKSRWQRGDT | CD16- |
| | FICAVMHEALHNHYTQISLSHSPGK | L(5)P |
| | | P(39)R |
| 192 | PGCGPLGGPSVFIFPPKPKDILVTARTPTVTCVVVDLDR | Exemplary variant |
| | ENPEVQISWFVDSKQVQTANTQPREEQSNGTYRVVSVLP | canine IgG-C Fc |
| | IGHQDWLSGKQFKCRVNNKALPSPIEEIISKTPGQAHQP | Protein A+ |
| | NVYVLPPSRDEMSKNTVTLTCLVKDFFPPEIDVEWQSNG | C1q- |
| | QQEPESKYRMTPPQLDEDGSYFLYSKLSVDKSRWQRGDT | CD16- |
| | FICAVMHEALHNHYTQISLSHSPGK | M(5)P |
| | | P(39)R |
| | | K(93)R |
| 193 | PVPESLGGPSVFIFPPKPKDTLLIARTPEITCVVLDLGR | Exemplary variant |
| | EDPEVQISWFVDGKEVHTAKTQPREQQFNSTYRVVSVLP | canine IgG-D Fc |
| | IGHQDWLTGKEFKCRVNHIGLPSPIERTISKARGQAHQP | C1q- |
| | SVYVLPPSPKELSSSDTVTLTCLIKDFFPPEIDVEWQSN | Protein A+ |
| | GQPEPESKYHTTAPQLDEDGSYFLYSKLSVDKSRWQQGD | I(21)T |
| | TFTCAVMHEALHNHYTDLSLSHSPGK | R(23)L |
| | | T(25)A |
| | | E(80)G |
| | | Q(207)H |
| 194 | PVPESLGGPSVFIFPPKPKDTLRITRTPEITCVVLDLGR | Exemplary variant |
| | EDPEVQISWFVDGKEVHTAKTQPREQQFNSTYRVVSVLP | canine IgG-D Fc |
| | IEHQDWLTGKEFKCRVNHIGLPSPIERTISKARGQAHQP | C1q- |
| | SVYVLPPSPKELSSSDTVTLTCLIKDFFPPEIDVEWQSN | Protein A+ |
| | GQPEPESKYHTTAPQLDEDGSYFLYSKLSVDKSRWQQGD | I(21)T |
| | TFTCAVMHEALHNHYTDLSLSHSPGK | |
| 195 | PVPEPLGGPSVLIFPPKPKDILRITRTPEVTCVVLDLGR | Exemplary variant |
| | EDPEVQISWFVDGKEVHTAKTQSREQQFNGTYRVVSVLP | canine IgG-A Fc |
| | IEHQDWLTGKEFKCRVNHIDLPSPIERTISKARGRAHKP | Bispecific knob |
| | SVYVLPPSPKELSSSDTVSIWCLIKDFYPPDIDVEWQSN | T(138)W |
| | GQQEPERKHRMTPPQLDEDGSYFLYSKLSVDKSRWQQGD | |
| | PFTCAVMHETLQNHYTDLSLSHSPGK | |
| 196 | PAPEMLGGPSVFIFPPKPKDTLLIARTPEVTCVVVDLDP | Exemplary variant |
| | EDPEVQISWFVDGKQMQTAKTQPREEQFNGTYRVVSVLP | canine IgG-B Fc |
| | IGHQDWLKGKQFTCKVNNKALPSPIERTISKARGQAHQP | Bispecific knob |
| | SVYVLPPSREELSKNTVSLWCLIKDFFPPDIDVEWQSNG | T(137)W |
| | QQEPESKYRTTPPQLDEDGSYFLYSKLSVDKSRWQRGDT | |
| | FICAVMHEALHNHYTQESLSHSPGK | |
| 197 | PGCGLLGGPSVFIFPPKPKDILVTARTPTVTCVVVDLDP | Exemplary variant |
| | ENPEVQISWFVDSKQVQTANTQPREEQSNGTYRVVSVLP | canine IgG-C Fc |
| | IGHQDWLSGKQFKCKVNNKALPSPIEEIISKTPGQAHQP | Bispecific knob |
| | NVYVLPPSRDEMSKNTVTLWCLVKDFFPPEIDVEWQSNG | T(137)W |
| | QQEPESKYRMTPPQLDEDGSYFLYSKLSVDKSRWQRGDT | |
| | FICAVMHEALHNHYTQISLSHSPGK | |
| 108 | PVPESLGGPSVFIFPPKPKDILRITRTPEITCVVLDLGR | Exemplary variant |
| | EDPEVQISWFVDGKEVHTAKTQPREQQFNSTYRVVSVLP | canine IgG-D Fc |
| | IEHQDWLTGKEFKCRVNHIGLPSPIERTISKARGQAHQP | Bispecific knob |
| | SVYVLPPSPKELSSSDTVTLWCLIKDFFPPEIDVEWQSN | T(138)W |
| | GQPEPESKYHTTAPQLDEDGSYFLYSKLSVDKSRWQQGD | |
| | TFTCAVMHEALQNHYTDLSLSHSPGK | |
| 199 | PVPEPLGGPSVLIFPPKPKDILRITRTPEVTCVVLDLGR | Exemplary variant |
| | EDPEVQISWFVDGKEVHTAKTQSREQQFNGTYRVVSVLP | canine IgG-A Fc |
| | IEHQDWLTGKEFKCRVNHIDLPSPIERTISKARGRAHKP | Bispecific hole |
| | SVYVLPPSPKELSSSDTVSISCAIKDFYPPDIDVEWQSN | T(138)S |
| | GQQEPERKHRMTPPQLDEDGSYFLYSKLSVDKSRWQQGD | L(140)A |
| | PFTCAVMHETLQNHYTDLSLSHSPGK | |
| 200 | PAPEMLGGPSVFIFPPKPKDTLLIARTPEVTCVVVDLDP | Exemplary variant |
| | EDPEVQISWFVDGKQMQTAKTQPREEQFNGTYRVVSVLP | canine IgG-B Fc |
| | IGHQDWLKGKQFTCKVNNKALPSPIERTISKARGQAHQP | Bispecific hole |
| | SVYVLPPSREELSKNTVSLSCAIKDFFPPDIDVEWQSNG | T(137)S |
| | QQEPESKYRTTPPQLDEDGSYFLYSKLSVDKSRWQRGDT | L(139)A |
| | FICAVMHEALHNHYTQESLSHSPGK | |
| 201 | PGCGLLGGPSVFIFPPKPKDILVTARTPTVTCVVVDLDP | Exemplary variant |
| | ENPEVQISWFVDSKQVQTANTQPREEQSNGTYRVVSVLP | canine IgG-C Fc |
| | IGHQDWLSGKQFKCKVNNKALPSPIEEIISKTPGQAHQP | Bispecific hole |
| | NVYVLPPSRDEMSKNTVTLSCAVKDFFPPEIDVEWQSNG | T(137)S |
| | QQEPESKYRMTPPQLDEDGSYFLYSKLSVDKSRWQRGDT | L(139)A |
| | FICAVMHEALHNHYTQISLSHSPGK | |
| 202 | PVPESLGGPSVFIFPPKPKDILRITRTPEITCVVLDLGR | Exemplary variant |
| | EDPEVQISWFVDGKEVHTAKTQPREQQFNSTYRVVSVLP | canine IgG-D Fc |
| | IEHQDWLTGKEFKCRVNHIGLPSPIERTISKARGQAHQP | Bispecific hole |
| | SVYVLPPSPKELSSSDTVTLSCAIKDFFPPEIDVEWQSN | T(138)S |
| | GQPEPESKYHTTAPQLDEDGSYFLYSKLSVDKSRWQQGD | L(140)A |
| | TFTCAVMHEALQNHYTDLSLSHSPGK | |
| 203 | RKTDHPPGPKPCDCPKCPPPEMLGGPSIFIFPPKPKDTL | Exemplary wild-type |
| | SISRTPEVTCLVVDLGPDDSDVQITWFVDNTQVYTAKTS | feline IgG1a Fc |
| | PREEQFNSTYRVVSVLPILHQDWLKGKEFKCKVNSKSLP | Protein A+ |
| | SPIERTISKAKGQPHEPQVYVLPPAQEELSENKVSVTCL | C1q+ |
| | IKSFHPPDIAVEWEITGQPEPENNYRTTPPQLDSDGTYF | |
| | VYSKLSVDRSHWQRGNTYTCSVSHEALHSHHTQKSLIQS | |
| | PGK | |
| 204 | RKTDHPPGPKTGEGPKCPPPEMLGGPSIFIFPPKPKDTL | Exemplary wild-type |
| | SISRTPEVTCLVVDLGPDDSDVQITWFVDNTQVYTAKTS | feline IgG1a Fc |
| | PREEQFNSTYRVVSVLPILHQDWLKGKEFKCKVNSKSLP | Protein A+ |
| | SPIERTISKAKGQPHEPQVYVLPPAQEELSENKVSVTCL | C1q+ |
| | IKSFHPPDIAVEWEITGQPEPENNYRTTPPQLDSDGTYF | |
| | VYSKLSVDRSHWQRGNTYTCSVSHEALHSHHTQKSLTQS | |
| | PGK | |
| 205 | RKTDHPPGPKPCDCPKCPPPEMLGGPSIFIFPPKPKDTL | Exemplary wild-type |
| | SISRTPEVTCLVVDLGPDDSDVQITWFVDNTQVYTAKTS | feline IgG1b Fc |
| | PREEQFNSTYRVVSVLPILHQDWLKGKEFKCKVNSKSLP | Protein A+ |
| | SPIERTISKDKGQPHEPQVYVLPPAQEELSENKVSVTCL | C1q+ |
| | IEGFYPSDIAVEWEITGQPEPENNYRTTPPQLDSDGTYF | |
| | LYSRLSVDRSRWQRGNTYTCSVSHEALHSHHTQKSLTQS | |
| | PGK | |
| 206 | RKTDHPPGPKTGEGPKCPPPEMLGGPSIFIFPPKPKDTL | Exemplary wild-type |
| | SISRTPEVTCLVVDLGPDDSDVQITWFVDNTQVYTAKTS | feline IgG1b Fc |
| | PREEQFNSTYRVVSVLPILHQDWLKGKEFKCKVNSKSLP | Protein A+ |
| | SPIERTISKDKGQPHEPQVYVLPPAQEELSENKVSVTCL | C1q+ |
| | IEGFYPSDIAVEWEITGQPEPENNYRTTPPQLDSDGTYF | |
| | LYSRLSVDRSRWQRGNTYTCSVSHEALHSHHTQKSLTQS | |
| | PGK | |
| 207 | PKTASTIESKTGEGPKCPVPEIPGAPSVFIFPPKPKDTL | Exemplary wild-type |
| | SISRTPEVTCLVVDLGPDDSNVQITWFVDNTEMHTAKTR | feline IgG2 Fc |
| | PREEQFNSTYRVVSVLPILHQDWLKGKEFKCKVNSKSLP | Protein A+ |
| | SAMERTISKAKGQPHEPQVYVLPPTQEELSENKVSVTCL | C1q- |
| | IKGFHPPDIAVEWEITGQPEPENNYQTTPPQLDSDGTYF | |
| | LYSRLSVDRSHWQRGNTYTCSVSHEALHSHHTQKSLTQS | |
| | PGK | |
| 208 | RKTDHPPGPKPCDCPPCPPPEMLGGPSIFIFPPKPKDTL | Exemplary variant feline |
| | SISRTPEVTCLVVDLGPDDSDVQITWFVDNTQVYTAKTS | IgG1a Fc with modified |
| | PREEQFNSTYRVVSVLPILHQDWLKGKEFKCKVNSKSLP | hinge |
| | SPIERTISKAKGQPHEPQVYVLPPAQEELSENKVSVTCL | K(16)P |
| | IKSFHPPDIAVEWEITGQPEPENNYRTTPPQLDSDGTYF | |
| | VYSKLSVDRSHWQRGNTYTCSVSHEALHSHHTQKSLTQS | |
| | PGK | |
| 209 | RKTDHPPGPKPCDCPKCPPPEMLGGPSIFIFPPKPKDTL | Exemplary variant feline |
| | SISRTPEVTCLVVDLGPDDSDVQITWFVDNTQVYTAKTS | IgG1a Fc |
| | PREEQFNSTYRVVSVLPILHQDWLKGKEFKCKVNSKSLP | Protein A+ |
| | SPIERTISKAKGQPHEPQVYVLPPAQEELSENKVSVTCL | C1q- |
| | IKSFHPPDIAVEWEITGQPEPENNYRTTPPQLDSDGTYF | P(198)A |
| | VYSKLSVDRSHWQRGNTYTCSVSHEALHSHHTQKSLTQS | |
| | PGK | |
| 210 | RKTDHPPGPKTGEGPKCPPPEMLGGPSIFIFPPKPKDTL | Exemplary variant feline |
| | SISRTPEVTCLVVDLGPDDSDVQITWFVDNTQVYTAKTS | IgG1a Fc |
| | PREEQFNSTYRVVSVLPILHQDWLKGKEFKCKVNSKSLP | Protein A+ |
| | SPIERTISKAKGQPHEPQVYVLPPAQEELSENKVSVTCL | C1q- |
| | IKSFHPPDIAVEWEITGQPEPENNYRTTPPQLDSDGTYF | P(198)A |
| | VYSKLSVDRSHWQRGNTYTCSVSHEALHSHHTQKSLTQS | |
| | PGK | |
| 211 | RKTDHPPGPKPCDCPPCPPPEMLGGPSIFIFPPKPKDTL | Exemplary variant feline |
| | SISRTPEVTCLVVDLGPDDSDVQITWFVDNTQVYTAKTS | IgG1b Fc with modified |
| | PREEQFNSTYRVVSVLPILHQDWLKGKEFKCKVNSKSLP | hinge |
| | SPIERTISKDKGQPHEPQVYVLPPAQEELSENKVSVTCL | K(16)P |
| | IEGFYPSDIAVEWEITGQPEPENNYRTTPPQLDSDGTYF | |
| | LYSRLSVDRSRWQRGNTYTCSVSHEALHSHHTQKSLIQS | |
| | PGK | |
| 212 | RKTDHPPGPKPCDCPKCPPPEMLGGPSIFIFPPKPKDTL | Exemplary variant feline |
| | SISRTPEVTCLVVDLGPDDSDVQITWFVDNTQVYTAKTS | IgG1b Fc |
| | PREEQFNSTYRVVSVLPILHQDWLKGKEFKCKVNSKSLP | Protein A+ |
| | SPIERTISKDKGQPHEPQVYVLPPAQEELSENKVSVTCL | C1q- |
| | IEGFYPSDIAVEWEITGQPEPENNYRTTPPQLDSDGTYF | P(198)A |
| | LYSRLSVDRSRWQRGNTYTCSVSHEALHSHHTQKSLTQS | |
| | PGK | |
| 213 | RKTDHPPGPKTGEGPKCPPPEMLGGPSIFIFPPKPKDTL | Exemplary variant feline |
| | SISRTPEVTCLVVDLGPDDSDVQITWFVDNTQVYTAKTS | IgG1b Fc |
| | PREEQFNSTYRVVSVLPILHQDWLKGKEFKCKVNSKSLP | Protein A+ |
| | SPIERTISKDKGQPHEPQVYVLPPAQEELSENKVSVTCL | C1q- |
| | IEGFYPSDIAVEWEITGQPEPENNYRTTPPQLDSDGTYF | P(198)A |
| | LYSRLSVDRSRWQRGNTYTCSVSHEALHSHHTQKSLTQS | |
| | PGK | |
| 214 | PKTASTIESKTGECPKCPVPEIPGAPSVFIFPPKPKDTL | Exemplary variant feline |
| | SISRTPEVTCLVVDLGPDDSNVQITWFVDNTEMHTAKTR | IgG2 Fc with modified |
| | PREEQFNSTYRVVSVLPILHQDWLKGKEFKCKVNSKSLP | hinge |
| | SAMERTISKAKGQPHEPQVYVLPPTQEELSENKVSVTCL | Hinge Cys |
| | IKGFHPPDIAVEWEITGQPEPENNYQTTPPQLDSDGTYF | G(14)C |
| | LYSRLSVDRSHWQRGNTYTCSVSHEALHSHHTQKSLTQS | |
| | PGK | |
| 215 | PKTASTIESKTGEGPPCPVPEIPGAPSVFIFPPKPKDTL | Exemplary variant feline |
| | SISRTPEVTCLVVDLGPDDSNVQITWFVDNTEMHTAKTR | IgG2 Fc with modified |
| | PREEQFNSTYRVVSVLPILHQDWLKGKEFKCKVNSKSLP | hinge |
| | SAMERTISKAKGQPHEPQVYVLPPTQEELSENKVSVTCL | K(16)P |
| | IKGFHPPDIAVEWEITGQPEPENNYQTTPPQLDSDGTYF | |
| | LYSRLSVDRSHWQRGNTYTCSVSHEALHSHHTQKSLIQS | |
| | PGK | |
| 216 | RKTDHPPGPKPCDCPKCPPPEMLGGPSVFIFPPKPKDTL | Exemplary variant feline |
| | SISRTPEVTCLVVDLGPDDSNVQITWFVDNTEMHTAKTR | IgG2 Fc with feline |
| | PREEQFNSTYRVVSVLPILHQDWLKGKEFKCKVNSKSLP | IgG1 hinge |
| | SAMERTISKAKGQPHEPQVYVLPPTQEELSENKVSVTCL | |
| | IKGFHPPDIAVEWEITGQPEPENNYQTTPPQLDSDGTYF | |
| | LYSRLSVDRSHWQRGNTYTCSVSHEALHSHHTQKSLIQS | |
| | PGK | |
| 217 | RKTDHPPGPKPCDCPKCPPPEMLGGPSIFIFPPKPKDTL | Exemplary variant feline |
| | SISRTPEVTCLVVDLGPDDSDVQITWFVDNTQVYTAKTS | IgG1a Fc |
| | PREEQFNSTYRVVSVLPILHQDWLKGKEFKCKVNSKSLP | Bispecific knob |
| | SPIERTISKAKGQPHEPQVYVLPPAQEELSENKVSVWCL | T(154)W |
| | IKSFHPPDIAVEWEITGQPEPENNYRTTPPQLDSDGTYF | |
| | VYSKLSVDRSHWQRGNTYTCSVSHEALHSHHTQKSLIQS | |
| | PGK | |
| 218 | RKTDHPPGPKTGEGPKCPPPEMLGGPSIFIFPPKPKDTL | Exemplary variant feline |
| | SISRTPEVTCLVVDLGPDDSDVQITWFVDNTQVYTAKTS | IgG1a Fc |
| | PREEQFNSTYRVVSVLPILHQDWLKGKEFKCKVNSKSLP | Bispecific knob |
| | SPIERTISKAKGQPHEPQVYVLPPAQEELSENKVSVWCL | T(154)W |
| | IKSFHPPDIAVEWEITGQPEPENNYRTTPPQLDSDGTYF | |
| | VYSKLSVDRSHWQRGNTYTCSVSHEALHSHHTQKSLTQS | |
| | PGK | |
| 219 | RKTDHPPGPKPCDCPKCPPPEMLGGPSIFIFPPKPKDTL | Exemplary variant feline |
| | SISRTPEVTCLVVDLGPDDSDVQITWFVDNTQVYTAKTS | IgG1b Fc |
| | PREEQFNSTYRVVSVLPILHQDWLKGKEFKCKVNSKSLP | Bispecific knob |
| | SPIERTISKDKGQPHEPQVYVLPPAQEELSENKVSVWCL | T(154)W |
| | IEGFYPSDIAVEWEITGQPEPENNYRTTPPQLDSDGTYF | |
| | LYSRLSVDRSRWQRGNTYTCSVSHEALHSHHTQKSLTQS | |
| | PGK | |
| 220 | RKTDHPPGPKTGEGPKCPPPEMLGGPSIFIFPPKPKDTL | Exemplary variant feline |
| | SISRTPEVTCLVVDLGPDDSDVQITWFVDNTQVYTAKTS | IgG1b Fc |
| | PREEQFNSTYRVVSVLPILHQDWLKGKEFKCKVNSKSLP | Bispecific knob |
| | SPIERTISKDKGQPHEPQVYVLPPAQEELSENKVSVWCL | T(154)W |
| | IEGFYPSDIAVEWEITGQPEPENNYRTTPPQLDSDGTYF | |
| | LYSRLSVDRSRWQRGNTYTCSVSHEALHSHHTQKSLTQS | |
| | PGK | |
| 221 | PKTASTIESKTGEGPKCPVPEIPGAPSVFIFPPKPKDTL | Exemplary variant feline |
| | SISRTPEVTCLVVDLGPDDSNVQITWFVDNTEMHTAKTR | IgG2 Fc |
| | PREEQFNSTYRVVSVLPILHQDWLKGKEFKCKVNSKSLP | Bispecific knob |
| | SAMERTISKAKGQPHEPQVYVLPPTQEELSENKVSVWCL | T(154)W |
| | IKGFHPPDIAVEWEITGQPEPENNYQTTPPQLDSDGTYF | |
| | LYSRLSVDRSHWQRGNTYTCSVSHEALHSHHTQKSLTQS | |
| | PGK | |
| 222 | RKTDHPPGPKPCDCPKCPPPEMLGGPSIFIFPPKPKDTL | Exemplary variant feline |
| | SISRTPEVTCLVVDLGPDDSDVQITWFVDNTQVYTAKTS | IgG1a Fc |
| | PREEQFNSTYRVVSVLPILHQDWLKGKEFKCKVNSKSLP | Bispecific hole |
| | SPIERTISKAKGQPHEPQVYVLPPAQEELSENKVSVSCA | T(154)S |
| | IKSFHPPDIAVEWEITGQPEPENNYRTTPPQLDSDGTYF | L(156)A |
| | VYSKLSVDRSHWQRGNTYTCSVSHEALHSHHTQKSLTQS | |
| | PGK | |
| 223 | RKTDHPPGPKTGEGPKCPPPEMLGGPSIFIFPPKPKDTL | Exemplary variant feline |
| | SISRTPEVTCLVVDLGPDDSDVQITWFVDNTQVYTAKTS | IgG1a Fc |
| | PREEQFNSTYRVVSVLPILHQDWLKGKEFKCKVNSKSLP | Bispecific hole |
| | SPIERTISKAKGQPHEPQVYVLPPAQEELSENKVSVSCA | T(154)S |
| | IKSFHPPDIAVEWEITGQPEPENNYRTTPPQLDSDGTYF | L(156)A |
| | VYSKLSVDRSHWQRGNTYTCSVSHEALHSHHTQKSLTQS | |
| | PGK | |
| 224 | RKTDHPPGPKPCDCPKCPPPEMLGGPSIFIFPPKPKDTL | Exemplary variant feline |
| | SISRTPEVTCLVVDLGPDDSDVQITWFVDNTQVYTAKTS | IgG1b Fc |
| | PREEQFNSTYRVVSVLPILHQDWLKGKEFKCKVNSKSLP | Bispecific hole |
| | SPIERTISKDKGQPHEPQVYVLPPAQEELSENKVSVSCA | T(154)S |
| | IEGFYPSDIAVEWEITGQPEPENNYRTTPPQLDSDGTYF | L(156)A |
| | LYSRLSVDRSRWQRGNTYTCSVSHEALHSHHTQKSLTQS | |
| | PGK | |
| 225 | RKTDHPPGPKTGEGPKCPPPEMLGGPSIFIFPPKPKDTL | Exemplary variant feline |
| | SISRTPEVTCLVVDLGPDDSDVQITWFVDNTQVYTAKTS | IgG1b Fc |
| | PREEQFNSTYRVVSVLPILHQDWLKGKEFKCKVNSKSLP | Bispecific hole |
| | SPIERTISKDKGQPHEPQVYVLPPAQEELSENKVSVSCA | T(154)S |
| | IEGFYPSDIAVEWEITGQPEPENNYRTTPPQLDSDGTYF | L(156)A |
| | LYSRLSVDRSRWQRGNTYTCSVSHEALHSHHTQKSLTQS | |
| | PGK | |
| 226 | PKTASTIESKTGEGPKCPVPEIPGAPSVFIFPPKPKDTL | Exemplary variant feline |
| | SISRTPEVTCLVVDLGPDDSNVQITWFVDNTEMHTAKTR | IgG2 Fc |
| | PREEQFNSTYRVVSVLPILHQDWLKGKEFKCKVNSKSLP | Bispecific hole |
| | SAMERTISKAKGQPHEPQVYVLPPTQEELSENKVSVSCA | T(154)S |
| | IKGFHPPDIAVEWEITGQPEPENNYQTTPPQLDSDGTYF | L(156)A |
| | LYSRLSVDRSHWQRGNTYTCSVSHEALHSHHTQKSLTQS | |
| | PGK | |
| 227 | ASTTAPSVFPLAPSCGSTSGSTVALACLVSGYFPEPVTV | Wild-type canine IgG-A |
| | SWNSGSLTSGVHTFPSVLQSSGLHSLSSMVTVPSSRWPS | CH1 |
| | ETFTCNVVHPASNTKVDKPV | |
| 228 | ASTTAPSVFPLAPSCGSTSGSTVALACLVSGYFPEPVTV | Wild-type canine IgG-B |
| | SWNSGSLTSGVHTFPSVLQSSGLYSLSSMVTVPSSRWPS | CH1 |
| | ETFTCNVAHPASKTKVDKPV | |
| 229 | ASTTAPSVFPLAPSCGSQSGSTVALACLVSGYIPEPVTV | Wild-type canine IgG-C |
| | SWNSVSLTSGVHTFPSVLQSSGLYSLSSMVTVPSSRWPS | CH1 |
| | ETFTCNVAHPATNTKVDKPV | |
| 230 | ASTTAPSVFPLAPSCGSTSGSTVALACLVSGYFPEPVTV | Wild-type canine IgG-D |
| | SWNSGSLTSGVHTFPSVLQSSGLYSLSSTVTVPSSRWPS | CH1 |
| | ETFTCNVVHPASNTKVDKPV | |
| 231 | ASTTAPSVFPLAPSCGSTSGSTVLLACLVDGYFPEPVTV | Variant canine IgG-A |
| | SWNSGSLTSGVHTFPSVLQSSGLHSLSSMVTVPSSRWPS | CH1 |
| | ETFTCNVVHPASNTKVDKPV | A(24)L |
| | | S(30)D |
| 232 | ASTTAPSVFPLAPSCGSTSGSTVLLACLVDGYFPEPVTV | Variant canine IgG-B |
| | SWNSGSLTSGVHTFPSVLQSSGLYSLSSMVTVPSSRWPS | CH1 |
| | ETFTCNVAHPASKTKVDKPV | A(24)L |
| | | S(30)D |
| 233 | ASTTAPSVFPLAPSCGSQSGSTVLLACLVDGYIPEPVTV | Variant canine IgG-C |
| | SWNSVSLTSGVHTFPSVLQSSGLYSLSSMVTVPSSRWPS | CH1 |
| | ETFTCNVAHPATNTKVDKPV | A(24)L |
| | | S(30)D |
| 234 | ASTTAPSVFPLAPSCGSTSGSTVLLACLVDGYFPEPVTV | Variant canine IgG-D |
| | SWNSGSLTSGVHTFPSVLQSSGLYSLSSTVTVPSSRWPS | CH1 |
| | ETFTCNVVHPASNTKVDKPV | A(24)L |
| | | S(30)D |
| 235 | RNDAQPAVYLFQPSPDQLHTGSASVVCLLNSFYPKDINV | Wild-type canine κ |
| | KWKVDGVIQDTGIQESVTEQDKDSTYSLSSTLTMSSTEY | constant region |
| | LSHELYSCEITHKSLPSTLIKSFQRSECQRVD | |
| 236 | RNDAQPAVYLAQPSPDQLHTGRASVVCLLNSFYPKDINV | Variant canine κ |
| | KWKVDGVIQDTGIQESVTEQDKDSTYSLSSTLTMSSTEY | constant region |
| | LSHELYSCEITHKSLPSTLIKSFQRSECQRVD | F(11)A |
| | | S(22)R |
| 237 | ASTTAPSVFPLAPSCGTTSGATVALACLVSGYFPEPVTV | Wild-type feline IgG1 |
| | SWNSGALTSGVHTFPAVLQASGLYSLSSMVTVPSSRWLS | CH1 |
| | DTFTCNVAHPPSNTKVDKTV | |
| 238 | ASTTASSVFPLAPSCGTTSGATVALACLSLGYFPEPVTV | Wild-type feline IgG2 |
| | SWNSGALTSGVHTFPSVLQASGLYSLSSMVTVPSSRWLS | CH1 |
| | DTFTCNVAHRPSSTKVDKTV | |
| 239 | ASTTAPSVFPLAPSCGTTSGATVLLACLVDGYFPEPVTV | Variant feline IgG1 CH1 |
| | SWNSGALISGVHTFPAVLQASGLYSLSSMVTVPSSRWLS | A(24)L |
| | DTFTCNVAHPPSNTKVDKTV | S(30)D |
| 240 | ASTTASSVFPLAPSCGTTSGATVLLACLDLGYFPEPVTV | Variant feline IgG2 CH1 |
| | SWNSGALISGVHTFPSVLQASGLYSLSSMVTVPSSRWLS | A(24)L |
| | DTFTCNVAHRPSSTKVDKTV | S(29)D |
| 241 | RSDAQPSVFLFQPSLDELHTGSASIVCILNDFYPKEVNV | Wild-type feline κ |
| | KWKVDGVVQNKGIQESTTEQNSKDSTYSLSSTLTMSSTE | constant region |
| | YQSHEKFSCEVTHKSLASTLVKSFNRSECQRE | |
| 242 | RSDAQPSVFLAQPSLDELHTGRASIVCILNDFYPKEVNV | Variant feline ic constant |
| | KWKVDGVVQNKGIQESTTEQNSKDSTYSLSSTLTMSSTE | region |
| | YQSHEKFSCEVTHKSLASTLVKSFNRSECQRE | F(11)A |
| | | S(22)R |
| 243 | EVQLVQSGAEVKKPGASVKVSCKASGYTFTSYVMHWVRQ | Caninized Clone I |
| | APGQGLEWMGYINPNNDGTFYNGKFQGRVTLTADTSTST | variable HC v2 and |
| | AYMELSSLRAGDIAVYYCAAFYYGFAYWGQGTLVTVSSA | variant canine IgG-B Fc |
| | STTAPSVFPLAPSCGSISGSTVLLACLVDGYFPEPVTVS | C1q- |
| | WNSGSLTSGVHTFPSVLQSSGLYSLSSMVTVPSSRWPSE | CD16- |
| | TFTCNVAHPASKTKVDKPVPKRENGRVPRPPDCPKCPAP | Bispecific Knob |
| | EPLGGPSVFIFPPKPKDTLLIARTPEVTCVVVDLDREDP | Variant CH1 |
| | EVQISWFVDGKQMQTAKTQPREEQFNGTYRVVSVLPIGH | |
| | QDWLKGKQFTCRVNNKALPSPIERTISKARGQAHQPSVY | |
| | VLPPSREELSKNTVTLWCLIKDFFPPDIDVEWQSNGQQE | |
| | PESKYRTTPPQLDEDGSYFLYSKLSVDKSRWQRGDTFIC | |
| | AVMHEALHNHYTQESLSHSPGK | |
| 244 | DIVMTQTPLSLSVSPGETASISCRASQEISGYLSWLQQK | Caninized Clone I |
| | PGGTIKRLIYAASNRDTGVPDRFSGSGSGTDFTLRISRV | variable LC v2 and |
| | EADDTGVYYCLQYASYPWTFGGGTKVELKRNDAQPAVYL | variant canine κ constant |
| | AQPSPDQLHTGRASVVCLLNSFYPKDINVKWKVDGVIQD | region |
| | TGIQESVTEQDKDSTYSLSSTLTMSSTEYLSHELYSCEI | |
| | THKSLPSTLIKSFQRSECQRVD | |
| 245 | EVQLVESGPSLVKPGGSLRLTCSVTGDSITSGYWNWIRK | Caninized anti-canine |
| | FPGNKLEYMGYISYSGITDYNPSLKSRITISRDTSKNQY | IL31 Clone M14 |
| | YLQLNSVTTEDTATYYCARYGNYGYAMDYWGQGTLVTVS | variable HC and variant |
| | SASTTAPSVFPLAPSCGSTSGSTVALACLVSGYFPEPVT | canine IgG-B Fc |
| | VSWNSGSLTSGVHTFPSVLQSSGLYSLSSMVTVPSSRWP | C1q- |
| | SETFTCNVAHPASKTKVDKPVPKRENGRVPRPPDCPKCP | CD16- |
| | APEPLGGPSVFIFPPKPKDTLLIARTPEVTCVVVDLDRE | Bispecific Hole |
| | DPEVQISWFVDGKQMQTAKTQPREEQFNGTYRVVSVLPI | |
| | GHQDWLKGKQFTCRVNNKALPSPIERTISKARGQAHQPS | |
| | VYVLPPSREELSKNTVTLSCAIKDFFPPDIDVEWQSNGQ | |
| | QEPESKYRTTPPQLDEDGSYFLYSKLSVDKSRWQRGDTF | |
| | ICAVMHEALHNHYTQESLSHSPGK | |
| 246 | DIVMTQSPASLSVSLGQRATISCRASESVDTYGNSFMHW | Caninized anti-canine |
| | YQQKPGQSPKLLIYRASNLESGIPARFGGSGSGTDFTLT | IL31 Clone M14 |
| | IDPVQADDVATYYCQQSYEDPWTFGGGTKLEIKRNDAQP | variable LC and canine κ |
| | AVYLFQPSPDQLHTGSASVVCLLNSFYPKDINVKWKVDG | constant region |
| | VIQDTGIQESVTEQDKDSTYSLSSTLTMSSTEYLSHELY | |
| | SCEITHKSLPSTLIKSFQRSECQRVD | |
| 247 | GPSVFIFPPNPKDTLMITRTPEVTCVVVDVSQENPDVKF | Exemplary wild-type |
| | NWYMDGVEVRTATTRPKEEQFNSTYRVVSVLRIQHQDWL | equine IgG1 Fc |
| | SGKEFKCKVNNQALPQPIERTITKTKGRSQEPQVYVLAP | |
| | HPDELSKSKVSVTCLVKDFYPPEINIEWQSNGQPELETK | |
| | YSTTQAQQDSDGSYFLYSKLSVDRNRWQQGTTFTCGVMH | |
| | EALHNHYTQKNVSKNPGK | |
| 248 | GPSVFIFPPNPKDALMISRTPVVTCVVVNLSDQYPDVQF | Exemplary wild-type |
| | SWYVDNTEVHSAITKQREAQFNSTYRVVSVLPIQHQDWL | equine IgG2 Fc |
| | SGKEFKCSVTNVGVPQPISRISRGKGPSRVPQVYVLPP | |
| | HPDELAKSKVSVTCLVKDFYPPDISVEWQSNRWPELEGK | |
| | YSTTPAQLDGDGSYFLYSKLSLETSRWQQVESFTCAVMH | |
| | EALHNHFTKTDISESLGK | |
| 249 | GPSVFIFPPKPKDVLMITRMPEVTCLVVDVSHDSSDVLF | Exemplary wild-type |
| | TWYVDGTEVKTAKTMPNEEQNNSTYRVVSVLRIQHQDWL | equine IgG3 Fc |
| | NGKKFKCKVNNQALPAPVERTISKATGQTRVPQVYVLAP | |
| | HPDELSKNKVSVTCLVKDFYPPDITVEWQSNEHPEPEGK | |
| | YRTTEAQKDSDGSYFLYSKLTVEKDRWQQGTTFTCVVMH | |
| | EALHNHVMQKNISKNPGK | |
| 250 | GPSVFIFPPKPKDVLMISRTPTVTCVVVDVGHDFPDVQF | Exemplary wild-type |
| | NWYVDGVETHTATTEPKQEQFNSTYRVVSVLPIQHKDWL | equine IgG4 Fc |
| | SGKEFKCKVNNKALPAPVERTISAPTGQPREPQVYVLAP | |
| | HRDELSKNKVSVTCLVKDFYPPDIDIEWKSNGQPEPETK | |
| | YSTTPAQLDSDGSYFLYSKLTVETNRWQQGTTFTCAVMH | |
| | EALHNHYTEKSVSKSPGK | |
| 251 | GPSVFIFPPKPKDVLMISRKPEVTCVVVDLGHDDPDVQF | Exemplary wild-type |
| | TWFVDGVETHTATTEPKEEQFNSTYRVVSVLPIQHQDWL | equine IgG5 Fc |
| | SGKEFKCSVTSKALPAPVERTISKAKGQLRVPQVYVLAP | |
| | HPDELAKNTVSVTCLVKDFYPPEIDVEWQSNEHPEPEGK | |
| | YSTTPAQLNSDGSYFLYSKLSVETSRWKQGESFTCGVMH | |
| | EAVENHYTQKNVSHSPGK | |
| 252 | GRPSVFIFPPNPKDTLMISRTPEVTCVVVDVSQENPDV | Exemplary wild-type |
| | KFNWYVDGVEAHTATTKAKEKQDNSTYRVVSVLPIQHQ | equine IgG6 Fc |
| | DWRRGKEFKCKVNNRALPAPVERTITKAKGELQDPKVY | |
| | ILAPHREEVTKNTVSVTCLVKDFYPPDINVEWQSNEEP | |
| | EPEVKYSTTPAQLDGDGSYFLYSKLTVETDRWEQGESF | |
| | TCVVMHEAIRHTYRQKSITNFPGK | |
| 253 | GPSVFIFPPKPKDVLMISRTPTVTCVVVDVGHDFPDVQF | Exemplary wild-type |
| | NWYVDGVETHTATTEPKQEQNNSTYRVVSILAIQHKDWL | equine IgG7 Fc |
| | SGKEFKCKVNNQALPAPVQKTISKPTGQPREPQVYVLAP | |
| | HPDELSKNKVSVTCLVKDFYPPDIDIEWKSNGQPEPETK | |
| | YSTTPAQLDGDGSYFLYSKLTVETNRWQQGTTFTCAVMH | |
| | EALHNHYTEKSVSKSPGK | |
| 254 | GPSVFIFPPNPKDTLMITRTPEVTCVVVDVSQENPDVKF | Exemplary variant |
| | NWYMDGVEVRTATTRPKEEQFNSTYRVVSVLRIQHQDWL | equine IgG1 Fc |
| | SGKEFKCKVNNQALPQPIERTITKTKGRSQEPQVYVLAP | Bispecific knob |
| | HPDELSKSKVSVWCLVKDFYPPEINIEWQSNGQPELETK | T(130)W |
| | YSTTQAQQDSDGSYFLYSKLSVDRNRWQQGTTFTCGVMH | |
| | EALHNHYTQKNVSKNPGK | |
| 255 | GPSVFIFPPNPKDALMISRTPVVTCVVVNLSDQYPDVQF | Exemplary variant |
| | SWYVDNTEVHSAITKQREAQFNSTYRVVSVLPIQHQDWL | equine IgG2 Fc |
| | SGKEFKCSVTNVGVPQPISRISRGKGPSRVPQVYVLPP | Bispecific knob |
| | HPDELAKSKVSVWCLVKDFYPPDISVEWQSNRWPELEGK | T(130)W |
| | YSTTPAQLDGDGSYFLYSKLSLETSRWQQVESFTCAVMH | |
| | EALHNHFTKTDISESLGK | |
| 256 | GPSVFIFPPKPKDVLMITRMPEVTCLVVDVSHDSSDVLF | Exemplary variant |
| | TWYVDGTEVKTAKTMPNEEQNNSTYRVVSVLRIQHQDWL | equine IgG3 Fc |
| | NGKKFKCKVNNQALPAPVERTISKATGQTRVPQVYVLAP | Bispecific knob |
| | HPDELSKNKVSVWCLVKDFYPPDITVEWQSNEHPEPEGK | T(130)W |
| | YRTTEAQKDSDGSYFLYSKLTVEKDRWQQGTTFTCVVMH | |
| | EALHNHVMQKNISKNPGK | |
| 257 | GPSVFIFPPKPKDVLMISRTPTVTCVVVDVGHDFPDVQF | Exemplary variant |
| | NWYVDGVETHTATTEPKQEQFNSTYRVVSVLPIQHKDWL | equine IgG4 Fc |
| | SGKEFKCKVNNKALPAPVERTISAPTGQPREPQVYVLAP | Bispecific knob |
| | HRDELSKNKVSVWCLVKDFYPPDIDIEWKSNGQPEPETK | T(130)W |
| | YSTTPAQLDSDGSYFLYSKLTVETNRWQQGTTFTCAVMH | |
| | EALHNHYTEKSVSKSPGK | |
| 258 | GPSVFIFPPKPKDVLMISRKPEVTCVVVDLGHDDPDVQF | Exemplary variant |
| | TWFVDGVETHTATTEPKEEQFNSTYRVVSVLPIQHQDWL | equine IgG5 Fc |
| | SGKEFKCSVTSKALPAPVERTISKAKGQLRVPQVYVLAP | Bispecific knob |
| | HPDELAKNTVSVWCLVKDFYPPEIDVEWQSNEHPEPEGK | T(130)W |
| | YSTTPAQLNSDGSYFLYSKLSVETSRWKQGESFTCGVMH | |
| | EAVENHYTQKNVSHSPGK | |
| 259 | RPSVFIFPPNPKDTLMISRTPEVTCVVVDVSQENPDVK | Exemplary variant |
| | FNWYVDGVEAHTATTKAKEKQDNSTYRVVSVLPIQHQD | equine IgG6 Fc |
| | WRRGKEFKCKVNNRALPAPVERTITKAKGELQDPKVYI | Bispecific knob |
| | LAPHREEVTKNTVSVWCLVKDFYPPDINVEWQSNEEPE | T(130)W |
| | PEVKYSTTPAQLDGDGSYFLYSKLTVETDRWEQGESFT | |
| | CVVMHEAIRHTYRQKSITNFPGK | |
| 260 | GPSVFIFPPKPKDVLMISRTPTVTCVVVDVGHDFPDVQF | Exemplary variant |
| | NWYVDGVETHTATTEPKQEQNNSTYRVVSILAIQHKDWL | equine IgG7 Fc |
| | SGKEFKCKVNNQALPAPVQKTISKPTGQPREPQVYVLAP | Bispecific knob |
| | HPDELSKNKVSVWCLVKDFYPPDIDIEWKSNGQPEPETK | T(130)W |
| | YSTTPAQLDGDGSYFLYSKLTVETNRWQQGTTFTCAVMH | |
| | EALHNHYTEKSVSKSPGK | |
| 261 | GPSVFIFPPNPKDTLMITRTPEVTCVVVDVSQENPDVKF | Exemplary variant |
| | NWYMDGVEVRTATTRPKEEQFNSTYRVVSVLRIQHQDWL | equine IgG1 Fc |
| | SGKEFKCKVNNQALPQPIERTITKTKGRSQEPQVYVLAP | Bispecific hole |
| | HPDELSKSKVSVSCAVKDFYPPEINIEWQSNGQPELETK | T(130)S |
| | YSTTQAQQDSDGSYFLYSKLSVDRNRWQQGTTFTCGVMH | L(132)A |
| | EALHNHYTQKNVSKNPGK | |
| 262 | GPSVFIFPPNPKDALMISRTPVVTCVVVNLSDQYPDVQF | Exemplary variant |
| | SWYVDNTEVHSAITKQREAQFNSTYRVVSVLPIQHQDWL | equine IgG2 Fc |
| | SGKEFKCSVTNVGVPQPISRISRGKGPSRVPQVYVLPP | Bispecific hole |
| | HPDELAKSKVSVSCAVKDFYPPDISVEWQSNRWPELEGK | T(130)S |
| | YSTTPAQLDGDGSYFLYSKLSLETSRWQQVESFTCAVMH | L(132)A |
| | EALHNHFTKTDISESLGK | |
| 263 | GPSVFIFPPKPKDVLMITRMPEVTCLVVDVSHDSSDVLF | Exemplary variant |
| | TWYVDGTEVKTAKTMPNEEQNNSTYRVVSVLRIQHQDWL | equine IgG3 Fc |
| | NGKKFKCKVNNQALPAPVERTISKATGQTRVPQVYVLAP | Bispecific hole |
| | HPDELSKNKVSVSCAVKDFYPPDITVEWQSNEHPEPEGK | T(130)S |
| | YRTTEAQKDSDGSYFLYSKLTVEKDRWQQGTTFTCVVMH | L(132)A |
| | EALHNHVMQKNISKNPGK | |
| 264 | GPSVFIFPPKPKDVLMISRTPTVTCVVVDVGHDFPDVQF | Exemplary variant |
| | NWYVDGVETHTATTEPKQEQFNSTYRVVSVLPIQHKDWL | equine IgG4 Fc |
| | SGKEFKCKVNNKALPAPVERTISAPTGQPREPQVYVLAP | Bispecific hole |
| | HRDELSKNKVSVSCAVKDFYPPDIDIEWKSNGQPEPETK | T(130)S |
| | YSTTPAQLDSDGSYFLYSKLTVETNRWQQGTTFTCAVMH | L(132)A |
| | EALHNHYTEKSVSKSPGK | |
| 265 | GPSVFIFPPKPKDVLMISRKPEVTCVVVDLGHDDPDVQF | Exemplary variant |
| | TWFVDGVETHTATTEPKEEQFNSTYRVVSVLPIQHQDWL | equine IgG5 Fc |
| | SGKEFKCSVTSKALPAPVERTISKAKGQLRVPQVYVLAP | Bispecific hole |
| | HPDELAKNTVSVSCAVKDFYPPEIDVEWQSNEHPEPEGK | T(130)S |
| | YSTTPAQLNSDGSYFLYSKLSVETSRWKQGESFTCGVMH | L(132)A |
| | EAVENHYTQKNVSHSPGK | |
| 266 | RPSVFIFPPNPKDTLMISRTPEVTCVVVDVSQENPDVK | Exemplary variant |
| | FNWYVDGVEAHTATTKAKEKQDNSTYRVVSVLPIQHQD | equine IgG6 Fc |
| | WRRGKEFKCKVNNRALPAPVERTITKAKGELQDPKVYI | Bispecific hole |
| | LAPHREEVTKNTVSVSCAVKDFYPPDINVEWQSNEEPE | T(130)S |
| | PEVKYSTTPAQLDGDGSYFLYSKLTVETDRWEQGESFT | L(132)A |
| | CVVMHEAIRHTYRQKSITNFPGK | |
| 267 | GPSVFIFPPKPKDVLMISRTPTVTCVVVDVGHDFPDVQF | Exemplary variant |
| | NWYVDGVETHTATTEPKQEQNNSTYRVVSILAIQHKDWL | equine IgG7 Fc |
| | SGKEFKCKVNNQALPAPVQKTISKPTGQPREPQVYVLAP | Bispecific hole |
| | HPDELSKNKVSVSCAVKDFYPPDIDIEWKSNGQPEPETK | T(130)S |
| | YSTTPAQLDGDGSYFLYSKLTVETNRWQQGTTFTCAVMH | L(132)A |
| | EALHNHYTEKSVSKSPGK | |
| 278 | TVSGFSLSRYSVH | Clone M3 CDR-H1 |
| 279 | GMIWGGGST | Clone M3 CDR-H2 |
| 280 | TYRGYALDY | Clone M3 CDR-H3 |
| 281 | QVQLKESGPGLVAPSQSLSITC | Clone M3 HC-FR1 |
| 282 | WVRQPPGKGLEWL | Clone M3 HC-FR2 |
| 283 | DYNSVFKSRLSISKDNSKSQVFLKMNSLQTDDTAMYYCA | Clone M3 HC-FR3 |
| | R | |
| 284 | WGQGTSVTVSS | Clone M3 HC-FR4 |
| 285 | RASQDISNYLN | Clone M3 CDR-L1 |
| 286 | YYTSRLQS | Clone M3 CDR-L2 |
| 287 | QQANTLPLT | Clone M3 CDR-L3 |
| 288 | DIQMTQTTSSLSASLGDRVTISC | Clone M3 LC-FR1 |
| 289 | WYQQKPDGTVKLLI | Clone M3 LC-FR2 |
| 290 | GVPSRFSGSGSGTDYCLTISNLEQEDIATYFC | Clone M3 LC-FR3 |
| 291 | FGSGTKLELK | Clone M3 LC-FR4 |
| 292 | QVQLKESGPGLVAPSQSLSITCTVSGFSLSRYSVHWVRQ | Clone M3 variable HC |
| | PPGKGLEWLGMIWGGGSTDYNSVFKSRLSISKDNSKSQV | |
| | FLKMNSLQTDDTAMYYCARTYRGYALDYWGQGTSVTVSS | |
| 293 | DIQMTQTTSSLSASLGDRVTISCRASQDISNYLNWYQQK | Clone M3 variable LC |
| | PDGTVKLLIYYTSRLQSGVPSRFSGSGSGTDYCLTISNL | |
| | EQEDIATYFCQQANTLPLTFGSGTKLELK | |
| 294 | TVSGFSLSRYSVH | Clone M5 CDR-H1 |
| 295 | GMIWGGGST | Clone M5 CDR-H2 |
| 296 | TYRGYALDY | Clone M5 CDR-H3 |
| 297 | QVQLKESGPGLVAPSQSLSITC | Clone M5 HC-FR1 |
| 298 | WVRQPPGKGLEWL | Clone M5 HC-FR2 |
| 299 | DYNSVFKSRLSISKDNSKSQVFLKMNSLQTDDTAMYYCA | Clone M5 HC-FR3 |
| | R | |
| 300 | WGQGTSVTVSS | Clone M5 HC-FR4 |
| 301 | RASQDISNYLN | Clone M5 CDR-L1 |
| 302 | YYTSRLQS | Clone M5 CDR-L2 |
| 303 | QQANTLPLT | Clone M5 CDR-L3 |
| 304 | DIQMTQTTSSLSASLGDRVTISC | Clone M5 LC-FR1 |
| 305 | WYQQKPDGTVKLLI | Clone M5 LC-FR2 |
| 306 | GVPSRFSGSGSGTDYCLTISNLEQEDIATYFC | Clone M5 LC-FR3 |
| 307 | FGSGTKLELK | Clone M5 LC-FR4 |
| 308 | QVQLKESGPGLVAPSQSLSITCTVSGFSLSRYSVHWVRQ | Clone M5 variable HC |
| | PPGKGLEWLGMIWGGGSTDYNSVFKSRLSISKDNSKSQV | |
| | FLKMNSLQTDDTAMYYCARTYRGYALDYWGQGTSVTVSS | |
| 309 | DIQMTQTTSSLSASLGDRVTISCRASQDISNYLNWYQQK | lone M5 variable LC |
| | PDGTVKLLIYYTSRLQSGVPSRFSGSGSGTDYCLTISNL | |
| | EQEDIATYFCQQANTLPLTFGSGTKLELK | |
| 310 | KASGYTFTSYDIN | Clone M8 CDR-H1 |
| 311 | GWIYPGDGSTK | Clone M8 CDR-H2 |
| 312 | SSFVV | Clone M8 CDR-H3 |
| 313 | QVQLQQSGPELVKPGALVKISC | Clone M8 HC-FR1 |
| 314 | WVKQRPGQGLEWI | Clone M8 HC-FR2 |
| 315 | YNEKFKGKATLTADKSSSTAYMQLSSLTSEDSAVYFCAR | Clone M8 HC-FR3 |
| 316 | WGAGTTVTVSS | Clone M8 HC-FR4 |
| 317 | KASDPINNWLA | Clone M8 CDR-L1 |
| 318 | SGATSLET | Clone M8 CDR-L2 |
| 319 | HQYWSIPYT | Clone M8 CDR-L3 |
| 320 | DIQMTQSSSYLSVSLGGRVTITC | Clone M8 LC-FR1 |
| 321 | WYQQKPGNAPRLLI | Clone M8 LC-FR2 |
| 322 | GVPSRISGSGSGKDYSLSITSLQTEDIATYYC | Clone M8 LC-FR3 |
| 323 | FGGGTKLEIK | Clone M8 LC-FR4 |
| 324 | QVQLQQSGPELVKPGALVKISCKASGYTFTSYDINWVKQ | Clone M8 variable HC |
| | RPGQGLEWIGWIYPGDGSTKYNEKFKGKATLTADKSSST | |
| | AYMQLSSLTSEDSAVYFCARSSFVVWGAGTTVTVSS | |
| 325 | DIQMTQSSSYLSVSLGGRVTITCKASDPINNWLAWYQQK | Clone M8 variable LC |
| | PGNAPRLLISGATSLETGVPSRISGSGSGKDYSLSITSL | |
| | QTEDIATYYCHQYWSIPYTFGGGTKLEIK | |
| 326 | AASGFTFSSFGMH | Clone M9 CDR-H1 |
| 327 | AYIRSDSSTIY | Clone M9 CDR-H2 |
| 328 | SGYYGSFSLTY | Clone M9 CDR-H3 |
| 329 | DVQLVESGGGLVQPGGSRKLSC | Clone M9 HC-FR1 |
| 330 | WVRQAPEKGLEWV | Clone M9 HC-FR2 |
| 331 | YADTVKGRFTISRDNPKNTLFLQMTSLRSEDTAMYYCAR | Clone M9 HC-FR3 |
| 332 | WGQGTLVTVSA | Clone M9 HC-FR4 |
| 333 | SASSSVSSNYLH | Clone M9 CDR-L1 |
| 334 | YRTSNLPS | Clone M9 CDR-L2 |
| 335 | QQGSGMLT | Clone M9 CDR-L3 |
| 336 | EIVLTQSPTTMAASPGEKITITC | Clone M9 LC-FR1 |
| 337 | WYQQKPGFSPKLLI | Clone M9 LC-FR2 |
| 338 | GVPARFFGSGSGTSYSLTIGTMEAEDVATYYC | Clone M9 LC-FR3 |
| 339 | FGAGTKLELK | Clone M9 LC-FR4 |
| 340 | DVQLVESGGGLVQPGGSRKLSCAASGFTFSSFGMHWVRQ | Clone M9 variable HC |
| | APEKGLEWVAYIRSDSSTIYYADTVKGRFTISRDNPKNT | |
| | LFLQMTSLRSEDTAMYYCARSGYYGSFSLTYWGQGTLVT | |
| | VSA | |
| 341 | EIVLTQSPTTMAASPGEKITITCSASSSVSSNYLHWYQQ | Clone M9 variable LC |
| | KPGFSPKLLIYRTSNLPSGVPARFFGSGSGTSYSLTIGT | |
| | MEAEDVATYYCQQGSGMLTFGAGTKLELK | |
| 342 | EVQLVESGGDLVKPAGSLRLSCTVSGFSLSRYSVHWVRQ | Caninized Clone M3 |
| | APGKGLEWLGMIWGGGSTDYNSVVKGRFTISRDNAKNTV | variable HC v1 |
| | YLQMNSLRAEDTAMYYCARTYRGYALDYWGQGTLVTVSS | |
| 343 | ELTLQESGPGLVKPSQTLSLTCTVSGFSLSRYSVHWIRQ | Caninized Clone M3 |
| | PRGRGLELLGMIWGGGSTDYNPAFQGRISITADTAKNQF | variable HC v2 |
| | SLQLSSMTTEDTAVYYCARTYRGYALDYWGQGTLVTVSS | |
| 344 | DIVMTQTPLSLSVSPGEPASISCRASQDISNYLNWYLQK | Caninized Clone M3 |
| | AGQSPRLLIYYTSRLQSGVPDRFSGSGSGTDFTLRIGRV | variable LC v1 |
| | EAEDAGIYFCQQANTLPLTFGQGTRLEVR | |
| 345 | EVQLVESGGDLVKPGGSLRLSCAASGFTFSSFGMHWVRQ | Caninized Clone M9 |
| | APGKGLEWVAYIRSDSSTIYYADAVKGRFTISRDNAKNT | variable HC v1 |
| | LYLQMNSLRAEDTAMYYCARSGYYGSFSLTYWGQGTLVT | |
| | VSS | |
| 346 | EVQLVESGGDLVKPGGSLRLSCVASGFTFSSFGMHWVRQ | Caninized Clone M9 |
| | APGKGLQWVAYIRSDSSTIYYADAVKGRFTISRDNAKNT | variable HC v2 |
| | LYLQMNSLRAEDTAMYYCARSGYYGSFSLTYWGQGTLVT | |
| | VSS | |
| 347 | DIMLTQTPLSLSVSPGEPASISCSASSSVSSNYLHWYLQ | Caninized Clone M9 |
| | KAGQSPRLLIYRTSNLPSGVPDRFSGSGSGTDFTLRIGR | variable LC v1 |
| | VEAEDAGIYYCQQGSGMLTFGQGTRLEVR | |
| 348 | EVQLVESGGDLVKPAGSLRLSCTVSGFSLSRYSVHWVRQ | Caninized Clone M3 |
| | APGKGLEWLGMIWGGGSTDYNSVVKGRFTISRDNAKNTV | variable HC v1 and |
| | YLQMNSLRAEDTAMYYCARTYRGYALDYWGQGTLVTVSS | variant canine IgG-B |
| | ASTTAPSVFPLAPSCGSTSGSTVALACLVSGYFPEPVTV | C1q-, CD16- |
| | SWNSGSLTSGVHTFPSVLQSSGLYSLSSMVTVPSSRWPS | |
| | ETFTCNVAHPASKTKVDKPVPKRENGRVPRPPDCPKCPA | |
| | PEPLGGPSVFIFPPKPKDTLLIARTPEVTCVVVDLDRED | |
| | PEVQISWFVDGKQMQTAKTQPREEQFNGTYRVVSVLPIG | |
| | HQDWLKGKQFTCRVNNKALPSPIERTISKARGQAHQPSV | |
| | YVLPPSREELSKNTVSLTCLIKDFFPPDIDVEWQSNGQQ | |
| | EPESKYRTTPPQLDEDGSYFLYSKLSVDKSRWQRGDTFI | |
| | CAVMHEALHNHYTQESLSHSPGK | |
| 349 | ELTLQESGPGLVKPSQTLSLTCTVSGFSLSRYSVHWIRQ | Caninized Clone M3 |
| | PRGRGLELLGMIWGGGSTDYNPAFQGRISITADTAKNQF | variable HC v2 and |
| | SLQLSSMTTEDTAVYYCARTYRGYALDYWGQGTLVTVSS | variant canine IgG-B |
| | ASTTAPSVFPLAPSCGSTSGSTVALACLVSGYFPEPVTV | C1q-, CD16- |
| | SWNSGSLTSGVHTFPSVLQSSGLYSLSSMVTVPSSRWPS | |
| | ETFTCNVAHPASKTKVDKPVPKRENGRVPRPPDCPKCPA | |
| | PEPLGGPSVFIFPPKPKDTLLIARTPEVTCVVVDLDRED | |
| | PEVQISWFVDGKQMQTAKTQPREEQFNGTYRVVSVLPIG | |
| | HQDWLKGKQFTCRVNNKALPSPIERTISKARGQAHQPSV | |
| | YVLPPSREELSKNTVSLTCLIKDFFPPDIDVEWQSNGQQ | |
| | EPESKYRTTPPQLDEDGSYFLYSKLSVDKSRWQRGDTFI | |
| | CAVMHEALHNHYTQESLSHSPGK | |
| 350 | DIVMTQTPLSLSVSPGEPASISCRASQDISNYLNWYLQK | Caninized Clone M3 |
| | AGQSPRLLIYYTSRLQSGVPDRFSGSGSGTDFTLRIGRV | variable LC v1 and |
| | EAEDAGIYFCQQANTLPLTFGQGTRLEVRRNDAQPAVYL | canine κ light constant |
| | FQPSPDQLHTGSASVVCLLNSFYPKDINVKWKVDGVIQD | region |
| | TGIQESVTEQDKDSTYSLSSTLTMSSTEYLSHELYSCEI | |
| | THKSLPSTLIKSFQRSECQRVD | |
| 351 | EVQLVESGGDLVKPGGSLRLSCAASGFTFSSFGMHWVRQ | Caninized Clone M9 |
| | APGKGLEWVAYIRSDSSTIYYADAVKGRFTISRDNAKNT | variable HC v1 and |
| | LYLQMNSLRAEDTAMYYCARSGYYGSFSLTYWGQGTLVT | variant canine IgG-B |
| | VSSASTTAPSVFPLAPSCGSTSGSTVALACLVSGYFPEP | C1q-, CD16- |
| | VTVSWNSGSLTSGVHTFPSVLQSSGLYSLSSMVTVPSSR | |
| | WPSETFTCNVAHPASKTKVDKPVPKRENGRVPRPPDCPK | |
| | CPAPEPLGGPSVFIFPPKPKDTLLIARTPEVTCVVVDLD | |
| | REDPEVQISWFVDGKQMQTAKTQPREEQFNGTYRVVSVL | |
| | PIGHQDWLKGKQFTCRVNNKALPSPIERTISKARGQAHQ | |
| | PSVYVLPPSREELSKNTVSLTCLIKDFFPPDIDVEWQSN | |
| | GQQEPESKYRTTPPQLDEDGSYFLYSKLSVDKSRWQRGD | |
| | TFICAVMHEALHNHYTQESLSHSPGK | |
| 352 | EVQLVESGGDLVKPGGSLRLSCVASGFTFSSFGMHWVRQ | Caninized Clone M9 |
| | APGKGLQWVAYIRSDSSTIYYADAVKGRFTISRDNAKNT | variable HC v2 and |
| | LYLQMNSLRAEDTAMYYCARSGYYGSFSLTYWGQGTLVT | variant canine IgG-B |
| | VSSASTTAPSVFPLAPSCGSTSGSTVALACLVSGYFPEP | C1q-, CD16- |
| | VTVSWNSGSLTSGVHTFPSVLQSSGLYSLSSMVTVPSSR | |
| | WPSETFTCNVAHPASKTKVDKPVPKRENGRVPRPPDCPK | |
| | CPAPEPLGGPSVFIFPPKPKDTLLIARTPEVTCVVVDLD | |
| | REDPEVQISWFVDGKQMQTAKTQPREEQFNGTYRVVSVL | |
| | PIGHQDWLKGKQFTCRVNNKALPSPIERTISKARGQAHQ | |
| | PSVYVLPPSREELSKNTVSLTCLIKDFFPPDIDVEWQSN | |
| | GQQEPESKYRTTPPQLDEDGSYFLYSKLSVDKSRWQRGD | |
| | TFICAVMHEALHNHYTQESLSHSPGK | |
| 353 | DIMLTQTPLSLSVSPGEPASISCSASSSVSSNYLHWYLQ | Caninized Clone M9 |
| | KAGQSPRLLIYRTSNLPSGVPDRFSGSGSGTDFTLRIGR | variable LC v1 and |
| | VEAEDAGIYYCQQGSGMLTFGQGTRLEVRRNDAQPAVYL | canine κ light constant |
| | FQPSPDQLHTGSASVVCLLNSFYPKDINVKWKVDGVIQD | region |
| | TGIQESVTEQDKDSTYSLSSTLTMSSTEYLSHELYSCEI | |
| | THKSLPSTLIKSFQRSECQRVD | |
| 354 | DFMGSENHTCVPEN | M3 canine IL4R epitope |
| 355 | GSVKVLHEPSCFSDYISTSVCQWKMDHPTNCSA | M8 canine IL4R |
| | | epitope 1 |
| 356 | REDSVCVCSMPI | M8 canine IL4R |
| | | epitope 2 |
| 357 | REDSVCVCSMPIDDAVEADV | M9 canine IL4R epitope |

### DESCRIPTION OF CERTAIN EMBODIMENTS

[0312] Antibodies that bind canine IL4R and/or feline IL4R are provided. Antibody heavy chains and light chains that are capable of forming antibodies that bind IL4R are also provided. In addition, antibodies, heavy chains, and light chains comprising one or more particular complementary determining regions (CDRs) are provided. Polynucleotides encoding antibodies to canine or feline IL4R are provided. Methods of producing or purifying antibodies to canine or feline IL4R are also provided. Methods of treatment using antibodies to canine and/or feline IL4/IL13 are provided. Such methods include, but are not limited to, methods of treating IL4-induced conditions and/or IL13-induced conditions in companion animal species. Methods of detecting soluble IL4R in a sample from a companion animal species are provided. Methods of screening for molecules that inhibit IL4 and/or IL13 signaling function (e.g., anti-IL4R, anti-IL13R, anti-IL4, and anti-IL13 antibodies and small molecule antagonists of IL4R, IL13R, IL4, and IL13) are also provided.

[0313] Also provided are variant IgG Fc polypeptides from companion animals, such as canine and feline, having increased binding to Protein A, decreased binding to C1q, decreased binding to CD16, increased stability, increased recombinant production, and/or increased hinge disulfide formation that may be used in the context of the canine or feline IL4R antibodies provided herein. In addition, provided herein are variant IgG Fc polypeptides and variant light chain constant regions from companion animals, such as canine, feline, and equine, for preparation of bispecific antibodies, including anti-IL4R antibodies. In some embodiments, anti-IL4R antibodies or antibody fragments comprise a variant IgG Fc polypeptide or a variant light chain constant region. Methods for preparing anti-IL4R antibodies and bispecific antibodies incorporating variant IgG Fc polypeptides are provided.

[0314] Novel antibodies directed against IL4R are provided, for example antibodies that bind to canine IL4R and/or feline IL4R. Anti-IL4R antibodies provided herein include, but are not limited to, monoclonal antibodies, mouse antibodies, chimeric antibodies, caninized antibodies, felinized antibodies, and bispecific antibodies. In some embodiments, an anti-IL4R antibody is an isolated mouse monoclonal antibody, such as Clone B, Clone I, M3, M5, M8, or M9.

[0315] Hybridoma clones were obtained after immunization of mice with canine IL4R using standard hybridoma technology. Monoclonal antibody Clone B, Clone I, M3, M5, M8, and M9 were selected for further investigation following enzyme linked immunosorbent assay (ELISA) screening, binding affinity assays, and in vitro neutralization assay. The heavy and light chains of Clone B and Clone I were sequenced and analyzed by sequence alignment (FIG. 1; SEQ ID NO: 27 (Clone B HC), SEQ ID NO: 28 (Clone B LC), SEQ ID NO: 49 (Clone I HC), and SEQ ID NO: 50 (Clone I LC)). The variable heavy (VH) and variable light (VL) chains of M3, M5, M8, and M9 were also sequenced (SEQ ID NO: 292 (M3 VH), SEQ ID NO: 293 (M3 VL), SEQ ID NO: 308 (M5 VH), SEQ ID NO: 309 (M5 VL), SEQ ID NO: 324 (M8 VH), SEQ ID NO: 325 (M8 VL), SEQ ID NO: 340 (M9 VH), and SEQ ID NO: 341 (M9 VL).

[0316] Also provided herein are amino acid sequences of monoclonal antibody Clone B and Clone I. Exemplary consensus CDR sequences were identified as CDR-H1: GYTFTSYVMH (SEQ ID NO: 1), CDR-H2: YINPX₁NDGTFYNGX₂X₃X₄G (SEQ ID NO: 2), wherein X₁ is K or A, X₂ K or A, X₃ is F or V, and X₄ is K or Q, or YINPX₁NDGT (SEQ ID NO: 268), wherein X₁ is K or A; CDR-H3: FX₅YGX₆AY (SEQ ID NO: 3), wherein X₅ is N or Y, and X₆ s I or F, CDR-L1: RASQEISGYLS (SEQ ID NO: 4); CDR-L2: AASX₇X₈DX₉ (SEQ ID NO: 5), wherein X₇ is T or N, X₈ is R or L, and X₉ is S or T; and CDR-L3: VQYASYPWT (SEQ ID NO: 6).

[0317] In addition, for example, variable heavy chain CDRs (SEQ ID NO: 7, SEQ ID NO: 8, SEQ ID NO: 269, and SEQ ID NO: 9), variable light chain CDRs (SEQ ID NO: 14, SEQ ID NO: 15, and SEQ ID NO: 16), variable region heavy chain framework sequences (SEQ ID NO: 10, SEQ ID NO: 11, SEQ ID NO: 12, SEQ ID NO: 270, and SEQ ID NO: 13), and variable region light chain framework sequences (SEQ ID NO: 17, SEQ ID NO: 18, SEQ ID NO: 19, and SEQ ID NO: 20) for monoclonal antibody Clone B are provided. Amino acid sequences of the variable heavy chain and variable light chain of monoclonal antibody Clone B are provided with and without leader sequence (SEQ ID NO: 21, SEQ ID NO: 22, SEQ ID NO: 23, and SEQ ID NO: 24). Amino acid sequences of the heavy chain and light chain of Clone B are provided with and without leader sequence (SEQ ID NO: 25, SEQ ID NO: 26, SEQ ID NO: 27, and SEQ ID NO: 28).

[0318] As another example, variable heavy chain CDRs (SEQ ID NO: 29, SEQ ID NO: 30, SEQ ID NO: 271, SEQ ID NO: 272, and SEQ ID NO: 31), variable light chain CDRs (SEQ ID NO: 36, SEQ ID NO: 37, and SEQ ID NO: 38), variable region heavy chain framework sequences (SEQ ID NO: 32, SEQ ID NO: 33, SEQ ID NO: 34, SEQ ID NO: 273, and SEQ ID NO: 35), and variable region light chain framework sequences (SEQ ID NO: 39, SEQ ID NO: 40, SEQ ID NO: 41, and SEQ ID NO: 42) for monoclonal antibody Clone I are provided. Amino acid sequences of the variable heavy chain and variable light chain of monoclonal antibody Clone I are provided with and without leader sequence (SEQ ID NO: 43, SEQ ID NO: 44, SEQ ID NO: 45, and SEQ ID NO: 46). Amino acid sequences of the heavy chain and light chain of Clone I are provided with and without leader sequence (SEQ ID NO: 47, SEQ ID NO: 48, SEQ ID NO: 49, and SEQ ID NO: 50).

[0319] As a further example, variable heavy chain CDRs (SEQ ID NO: 278, SEQ ID NO: 279, SEQ ID NO: 280), variable light chain CDRs (SEQ ID NO: 285, SEQ ID NO: 286, and SEQ ID NO: 287), variable region heavy chain framework sequences (SEQ ID NOs: 281-284), and variable region light chain framework sequences (SEQ ID NOs: 288-291) for M3 are provided.

[0320] As another example, variable heavy chain CDRs (SEQ ID NO: 294, SEQ ID NO: 295, SEQ ID NO: 296), variable light chain CDRs (SEQ ID NO: 301, SEQ ID NO: 302, and SEQ ID NO: 303), variable region heavy chain framework sequences (SEQ ID NOs: 297-300), and variable region light chain framework sequences (SEQ ID NOs: 304-307) for M5 are provided.

[0321] Further exemplified herein are variable heavy chain CDRs (SEQ ID NO: 310, SEQ ID NO: 311, SEQ ID NO: 312), variable light chain CDRs (SEQ ID NO: 317, SEQ ID NO: 318, and SEQ ID NO: 319), variable region heavy chain framework sequences (SEQ ID NOs: 313-316), and variable region light chain framework sequences (SEQ ID NOs: 320-323) for M8.

[0322] Also exemplified herein are variable heavy chain CDRs (SEQ ID NO: 326, SEQ ID NO: 327, SEQ ID NO: 328), variable light chain CDRs (SEQ ID NO: 333, SEQ ID NO: 334, and SEQ ID NO: 335), variable region heavy chain framework sequences (SEQ ID NOs: 329-332), and variable region light chain framework sequences (SEQ ID NOs: 336-339) for M9.

[0323] Also provided herein are chimeric, caninized, and felinized antibodies derived from monoclonal antibody Clone B, Clone I, M3, M5, M8, and M9. In some embodiments, amino acid sequences of chimeric antibodies derived from Clone B are provided, such as SEQ ID NO: 51, SEQ ID NO: 52, SEQ ID NO: 53, and SEQ ID NO: 54, In some embodiments, amino acid sequences of chimeric antibodies derived from Clone I are provided, such as SEQ ID NO: 55, SEQ ID NO: 56, SEQ ID NO: 57, and SEQ ID NO: 58. In some embodiments, amino acid sequences of caninized Clone B are provided, such as SEQ ID NO: 59, SEQ ID NO: 60, SEQ ID NO: 61, SEQ ID NO: 62, SEQ ID NO: 71, SEQ ID NO: 72, SEQ ID NO: 73, and SEQ ID NO: 74. In some embodiments, amino acid sequences of caninized Clone I are provided, such as SEQ ID NO: 63, SEQ ID NO: 64, SEQ ID NO: 274, SEQ ID NO: 65, SEQ ID NO: 66, SEQ ID NO: 275, SEQ ID NO: 75, SEQ ID NO: 76, SEQ ID NO: 276, SEQ ID NO: 77, SEQ ID NO: 78, and SEQ ID NO: 277. In some embodiments, amino acid sequences of felinized antibodies derived from Clone B are provided, such as SEQ ID NO: 67, SEQ ID NO: 68, SEQ ID NO: 79, SEQ ID NO: 80, and SEQ ID NO: 81. In some embodiments, amino acid sequences of felinized antibodies derived from Clone I are provided, such as SEQ ID NO: 69, SEQ ID NO: 70, SEQ ID NO: 82, SEQ ID NO: 83, and SEQ ID NO: 84. In some embodiments, amino acid sequences of caninized antibodies derived from M3 are provided, such as SEQ ID NO: 342, SEQ ID NO: 343, SEQ ID NO: 344, SEQ ID NO: 348, SEQ ID NO: 349, and SEQ ID NO: 350. In some embodiments, amino acid sequences of caninized antibodies derived from M9 are provided, such as SEQ ID NO: 345, SEQ ID NO: 346, SEQ ID NO: 347, SEQ ID NO: 351, SEQ ID NO: 352, and SEQ ID NO: 353.

[0324] As used herein, numerical terms such as Kd are calculated based upon scientific measurements and, thus, are subject to appropriate measurement error. In some instances, a numerical term may include numerical values that are rounded to the nearest significant figure.

[0325] As used herein, “a” or “an” means “at least one” or “one or more” unless otherwise specified. As used herein, the term “or” means “and/or” unless specified otherwise. In the context of a multiple dependent claim, the use of “or” when referring back to other claims refers to those claims in the alternative only.

[0326] The term “antibody” herein is used in the broadest sense and encompasses various antibody structures, including but not limited to monoclonal antibodies, polyclonal antibodies, multispecific antibodies (for example, bispecific (such as Bi-specific T-cell engagers) and trispecific antibodies), and antibody fragments (such as Fab, F(ab′)₂, ScFv, minibody, diabody, triabody, and tetrabody) so long as they exhibit the desired antigen-binding activity. Canine, feline, and equine species have different varieties (classes) of antibodies that are shared by many mammalians.

[0327] The term antibody includes, but is not limited to, fragments that are capable of binding to an antigen, such as Fv, single-chain Fv (scFv), Fab, Fab′, di-scFv, sdAb (single domain antibody) and (Fab′)2 (including a chemically linked F(ab′)2). Papain digestion of antibodies produces two identical antigen-binding fragments, called “Fab” fragments, each with a single antigen-binding site, and a residual “Fc” fragment, whose name reflects its ability to crystallize readily. Pepsin treatment yields an F(ab′)2 fragment that has two antigen combining sites and is still capable of cross-linking antigen. The term antibody also includes, but is not limited to, chimeric antibodies, humanized antibodies, and antibodies of various species such as mouse, human, cynomolgus monkey, canine, feline, equine, etc. Furthermore, for all antibody constructs provided herein, variants having the sequences from other organisms are also contemplated. Thus, if a murine version of an antibody is disclosed, one of skill in the art will appreciate how to transform the murine sequence-based antibody into a cat, dog, horse, etc. sequence. Antibody fragments also include either orientation of single chain scFvs, tandem di-scFv, diabodies, tandem tri-sdcFv, minibodies, etc. Antibody fragments also include nanobodies (sdAb, an antibody having a single, monomeric domain, such as a pair of variable domains of heavy chains, without a light chain). An antibody fragment can be referred to as being a specific species in some embodiments (for example, mouse scFv or a canine scFv). This denotes the sequences of at least part of the non-CDR regions, rather than the source of the construct. In some embodiments, the antibodies comprise a label or are conjugated to a second moiety.

[0328] The terms “label” and “detectable label” mean a moiety attached to an antibody or its analyte to render a reaction (for example, binding) between the members of the specific binding pair, detectable. The labeled member of the specific binding pair is referred to as “detectably labeled.” Thus, the term “labeled binding protein” refers to a protein with a label incorporated that provides for the identification of the binding protein. In some embodiments, the label is a detectable marker that can produce a signal that is detectable by visual or instrumental means, for example, incorporation of a radiolabeled amino acid or attachment to a polypeptide of biotinyl moieties that can be detected by marked avidin (for example, streptavidin containing a fluorescent marker or enzymatic activity that can be detected by optical or colorimetric methods). Examples of labels for polypeptides include, but are not limited to, the following: radioisotopes or radionuclides (for example, ³H, ¹⁴C, ³⁵S, ⁹⁰Y, ⁹⁹Tc, ¹¹¹In, ¹²⁵I, ¹³¹I, ¹⁷⁷Lu, ¹⁶⁶Ho, or ¹⁵³Sm); chromogens, fluorescent labels (for example, FITC, rhodamine, lanthanide phosphors), enzymatic labels (for example, horseradish peroxidase, luciferase, alkaline phosphatase); chemiluminescent markers; biotinyl groups; predetermined polypeptide epitopes recognized by a secondary reporter (for example, leucine zipper pair sequences, binding sites for secondary antibodies, metal binding domains, epitope tags); and magnetic agents, such as gadolinium chelates. Representative examples of labels commonly employed for immunoassays include moieties that produce light, for example, acridinium compounds, and moieties that produce fluorescence, for example, fluorescein. In this regard, the moiety itself may not be detectably labeled but may become detectable upon reaction with yet another moiety.

[0329] The term “monoclonal antibody” refers to an antibody of a substantially homogeneous population of antibodies, that is, the individual antibodies comprising the population are identical except for possible naturally-occurring mutations that may be present in minor amounts. Monoclonal antibodies are highly specific, being directed against a single antigenic site. Furthermore, in contrast to polyclonal antibody preparations, which typically include different antibodies directed against different determinants (epitopes), each monoclonal antibody is directed against a single determinant on the antigen. Thus, a sample of monoclonal antibodies can bind to the same epitope on the antigen. The modifier “monoclonal” indicates the character of the antibody as being obtained from a substantially homogeneous population of antibodies, and is not to be construed as requiring production of the antibody by any particular method. For example, the monoclonal antibodies may be made by the hybridoma method first described by Kohler and Milstein, 1975, Nature 256:495, or may be made by recombinant DNA methods such as described in U.S. Pat. No. 4,816,567. The monoclonal antibodies may also be isolated from phage libraries generated using the techniques described in McCafferty et al., 1990, Nature 348:552-554, for example.

[0330] In some embodiments, the monoclonal antibody is an isolated mouse antibody selected from Clone B, Clone I, M3, M5, M8, and M9.

[0331] “Amino acid sequence,” means a sequence of amino acids residues in a peptide or protein. The terms “polypeptide” and “protein” are used interchangeably to refer to a polymer of amino acid residues, and are not limited to a minimum length. Such polymers of amino acid residues may contain natural or non-natural amino acid residues, and include, but are not limited to, peptides, oligopeptides, dimers, trimers, and multimers of amino acid residues. Both full-length proteins and fragments thereof are encompassed by the definition. The terms also include post-expression modifications of the polypeptide, for example, glycosylation, sialylation, acetylation, phosphorylation, and the like. Furthermore, for purposes of the present disclosure, a “polypeptide” refers to a protein which includes modifications, such as deletions, additions, and substitutions (generally conservative in nature), to the native sequence, as long as the protein maintains the desired activity. These modifications may be deliberate, as through site-directed mutagenesis, or may be accidental, such as through mutations of hosts which produce the proteins or errors due to PCR amplification.

[0332] As used herein, “percent (%) amino acid sequence identity” and “homology” with respect to a peptide, polypeptide, or antibody sequence are defined as the percentage of amino acid residues in a candidate sequence that are identical with the amino acid residues in the specific peptide or polypeptide sequence, after aligning the sequences and introducing gaps, if necessary to achieve the maximum percent sequence identity, and not considering any conservative substitutions as part of the sequence identity. Alignment for purposes of determining percent amino acid sequence identity can be achieved in various ways that are within the skill in the art, for instance, using publicly available computer software such as BLAST, BLAST-2, ALIGN, or MEGALINE™ (DNASTAR) software. Those skilled in the art can determine appropriate parameters for measuring alignment, including any algorithms needed to achieve maximal alignment over the full length of sequences being compared.

[0333] In some embodiments, a variant has at least about 50% sequence identity with the reference nucleic acid molecule or polypeptide after aligning the sequences and introducing gaps, if necessary, to achieve the maximum percent sequence identity, and not considering any conservative substitutions as part of the sequence identity. Such variants include, for instance, polypeptides wherein one or more amino acid residues are added, deleted, at the N- or C-terminus of the polypeptide. In some embodiments, a variant has at least about 50% sequence identity, at least about 60% sequence identity, at least about 65% sequence identity, at least about 70% sequence identity, at least about 75% sequence identity, at least about 80% sequence identity, at least about 85% sequence identity, at least about 90% sequence identity, at least about 95% sequence identity, at least about 97% sequence identity, at least about 98% sequence identity, or at least about 99% sequence identity with the sequence of the reference nucleic acid or polypeptide.

[0334] A “point mutation” is a mutation that involves a single amino acid residue. The mutation may be the loss of an amino acid, substitution of one amino acid residue for another, or the insertion of an additional amino acid residue.

[0335] An “amino acid substitution” refers to the replacement of one amino acid in a polypeptide with another amino acid. In some embodiments, an amino acid substitution is a conservative substitution. Nonlimiting exemplary conservative amino acid substitutions are shown in Table 2. Amino acid substitutions may be introduced into a molecule of interest and the products screened for a desired activity, for example, retained/improved antigen binding, decreased immunogenicity, improved ADCC or CDC, improved recombinant production, and/or enhanced pharmacokinetics.

TABLE 2

| Original | |
|---|---|
| Residue | Exemplary Substitutions |
| Ala (A) | Val; Leu; Ile |
| Arg (R) | Lys; Gln; Asn |
| Asn (N) | Gln; His; Asp; Lys; Arg |
| Asp (D) | Glu; Asn |
| Cys (C) | Ser; Ala |
| Gln (Q) | Asn; Glu |
| Glu (E) | Asp; Gln |
| Gly (G) | Ala |
| His (H) | Asn; Gln; Lys; Arg |
| Ile (I) | Leu; Val; Met; Ala; Phe; |
| | Norleucine |
| Leu (L) | Norleucine; Ile; Val; |
| | Met; Ala; Phe |
| Lys (K) | Arg; Gln; Asn |
| Met (M) | Leu; Phe; Ile |
| Phe (F) | Trp; Leu; Val; Ile; Ala; Tyr |
| Pro (P) | Ala |
| Ser (S) | Thr |
| Thr (T) | Val; Ser |
| Trp (W) | Tyr; Phe |
| Tyr (Y) | Trp; Phe; Thr; Ser |
| Val (V) | Ile; Leu; Met; Phe; Ala; |
| | Norleucine |

[0336] Amino acids may be grouped according to common side-chain properties:
[0337] (1) hydrophobic: Norleucine, Met, Ala, Val, Leu, Ile;
[0338] (2) neutral hydrophilic: Cys, Ser, Thr, Asn, Gln;
[0339] (3) acidic: Asp, Glu;
[0340] (4) basic: His, Lys, Arg;
[0341] (5) residues that influence chain orientation: Gly, Pro;
[0342] (6) aromatic: Trp, Tyr, Phe.

[0343] Non-conservative substitutions will entail exchanging a member of one of these classes with another class.

[0344] An “amino acid derivative,” as used herein, refers to any amino acid, modified amino acid, and/or amino acid analogue, that is not one of the 20 common natural amino acids found in humans. Exemplary amino acid derivatives include natural amino acids not found in humans (e.g., seleno cysteine and pyrrolysine, which may be found in some microorganisms) and unnatural amino acids. Exemplary amino acid derivatives, include, but are not limited to, amino acid derivatives commercially available through chemical product manufacturers (e.g., sigmaaldrich.com/chemistry/chemistry-products.html?TablePage=16274965, accessed on May 6, 2017, which is incorporated herein by reference). One or more amino acid derivatives may be incorporated into a polypeptide at a specific location using a translation system that utilizes host cells, orthogonal aminoacyl-tRNA synthetases derived from eubacterial synthetases, orthogonal tRNAs, and an amino acid derivative. For further descriptions, see, e.g., U.S. Pat. No. 9,624,485.

[0345] In some embodiments, a polypeptide comprises an amino acid substitution with an amino acid derivative. In some embodiments, the amino acid derivative is an alanine derivative, a cysteine derivative, an aspartic acid derivative, a glutamic acid derivative, a phenylalanine derivative, a glycine derivative, a histidine derivative, an isoleucine derivative, a lysine derivative, a leucine derivative, a methionine derivative, an asparagine derivative, a proline derivative, a glutamine derivative, an arginine derivative, a serine derivative, a threonine derivative, a valine derivative, a tryptophan derivative, or a tyrosine derivative.

[0346] “IL4R,” as used herein, is a polypeptide comprising the entirety or a fragment of IL4 receptor subunit alpha that binds to IL4.

[0347] For example, “IL4R” refers to an IL4R polypeptide from any vertebrate source, including mammals such as primates (e.g., humans and cynomolgus monkeys), rodents (e.g., mice and rats), and companion animals (e.g., dogs, cats, and equine), unless otherwise indicated. The term also includes naturally occurring variants of IL4R, e.g., splice variants or allelic variants, or man-made variants of IL4R, e.g., labeled IL4R polypeptides. In some embodiments, IL4R is an extracellular domain fragment that binds IL4. In some such embodiments, the IL4R may be referred to as an IL4R extracellular domain (ECD). In some embodiments, IL4R comprises the amino acid sequence of SEQ ID NOs: 94, 95, 96, 97, 98, 99, 100, 101, 102, 103, 104, 105, 106, 107, 108, 109, 110, 111, 112, 113, 114, 115, 116, or 117.

[0348] “IL4,” as used herein, is a polypeptide comprising the entirety or a fragment of IL4 that binds to IL4R.

[0349] For example, IL4 refers to a IL4 polypeptide from any vertebrate source, including mammals such as primates (e.g., humans and cynomolgus monkeys), rodents (e.g., mice and rats), and companion animals (e.g., dogs, cats, and equine), unless otherwise indicated. The term also includes naturally occurring variants of IL4, e.g., splice variants or allelic variants, or man-made variants of IL4, e.g., labeled IL4 polypeptides. In some embodiments, IL4 comprises the amino acid sequence of SEQ ID NO: 118, 119, 120, 121, 122, or 123, or a processed version thereof. In some embodiments, IL4 comprises the amino acid sequence of SEQ ID NO: 124, 125, 126, 127, 128, 129, 130, or 131.

[0350] “IL13,” as used herein, is a polypeptide comprising the entirety or a fragment of IL13 that binds to IL4R.

[0351] For example, IL13 refers to a IL13 polypeptide from any vertebrate source, including mammals such as primates (e.g., humans and cynomolgus monkeys), rodents (e.g., mice and rats), and companion animals (e.g., dogs, cats, and equine), unless otherwise indicated. The term also includes naturally occurring variants of IL13, e.g., splice variants or allelic variants, or man-made variants of IL13, e.g., labeled IL13 polypeptides. In some embodiments, IL13 comprises the amino acid sequence of SEQ ID NO: 154 or 155, or a processed version thereof. In some embodiments, IL31 comprises the amino acid sequence of SEQ ID NO: 156, 157, 158, or 159.

[0352] “IL13R” or “IL13Ra1,” as used herein, is a polypeptide comprising the entirety or a fragment of IL13R that pairs with IL4R to bind to IL4 or IL13.

[0353] “Gamma C receptor,” as used herein, is a polypeptide comprising the entirety or a fragment of common gamma chain receptor that pairs with IL4R to bind to IL4.

[0354] The term “IL4R binding domain” of an antibody means the binding domain formed by a light chain and heavy chain of an anti-IL4R antibody, which binds IL4R.

[0355] In some embodiments, the IL4R binding domain binds canine IL4R with greater affinity than it binds human IL4R. In some embodiments, the IL4R binding domain binds feline IL4R.

[0356] “IL4/IL13 signaling function,” as used herein refers to any cellular effect that results when IL4 binds to IL4R paired with IL13R or Gamma C receptor, or when IL13 binds to IL4R paired with IL13R. Cellular effects may include STATE phosphorylation, differentiation of T helper cells into Th2 cells, activation of B cell and/or T cell proliferation, and/or induction of B cell class switching to IgE.

[0357] As used herein, the term “epitope” refers to a site on a target molecule (for example, an antigen, such as a protein, nucleic acid, carbohydrate or lipid) to which an antigen-binding molecule (for example, an antibody, antibody fragment, or scaffold protein containing antibody binding regions) binds. Epitopes often include a chemically active surface grouping of molecules such as amino acids, polypeptides or sugar side chains and have specific three-dimensional structural characteristics as well as specific charge characteristics. Epitopes can be formed both from contiguous or juxtaposed noncontiguous residues (for example, amino acids, nucleotides, sugars, lipid moiety) of the target molecule. Epitopes formed from contiguous residues (for example, amino acids, nucleotides, sugars, lipid moiety) typically are retained on exposure to denaturing solvents whereas epitopes formed by tertiary folding typically are lost on treatment with denaturing solvents. An epitope may include but is not limited to at least 3, at least 5 or 8-10 residues (for example, amino acids or nucleotides). In some examples an epitope is less than 20 residues (for example, amino acids or nucleotides) in length, less than 15 residues or less than 12 residues. Two antibodies may bind the same epitope within an antigen if they exhibit competitive binding for the antigen. In some embodiments, an epitope can be identified by a certain minimal distance to a CDR residue on the antigen-binding molecule. In some embodiments, an epitope can be identified by the above distance, and further limited to those residues involved in a bond (for example, a hydrogen bond) between an antibody residue and an antigen residue. An epitope can be identified by various scans as well, for example an alanine or arginine scan can indicate one or more residues that the antigen-binding molecule can interact with. Unless explicitly denoted, a set of residues as an epitope does not exclude other residues from being part of the epitope for a particular antibody. Rather, the presence of such a set designates a minimal series (or set of species) of epitopes. Thus, in some embodiments, a set of residues identified as an epitope designates a minimal epitope of relevance for the antigen, rather than an exclusive list of residues for an epitope on an antigen.

[0358] In some embodiments, the epitope is within L41 and T50 of canine IL4R ECD (SEQ ID NO: 99) or feline IL4R ECD (SEQ ID NO: 100), such as within R36 and N55. For example, the epitope may comprise the amino acid sequence of SEQ ID NO: 88, SEQ ID NO: 89, SEQ ID NO: 91, or SEQ ID NO: 92. In some embodiments, the epitope comprises the amino acid sequence LX₁₀FMGSENX₁₁T, wherein X₁₀ is D or N and X₁₁ is H or R (SEQ ID NO: 85). In some embodiments, the epitope comprises the amino acid sequence RLSYQLX₁₀FMGSENX₁₁TCVPEN, wherein X₁₀ is D or N and X₁₁ is H or R (SEQ ID NO: 86).

[0359] In some embodiments, the epitope is within amino acids S64 and Q85 of canine IL4R ECD (SEQ ID NO: 99) or feline IL4R ECD (SEQ ID NO: 100). For example, the epitope may comprise the amino acid sequence of SEQ ID NO: 90 or SEQ ID NO: 93. In some embodiments, the epitope comprises the amino acid sequence SMX₁₂X₁₃DDX₁₄VEADVYQLX₁₅LWAGXQ, wherein X₁₂ is P or L, X₁₃ is I or M, X₁₄ is A or F, X₁₅ is D or H, and X₁₆ is Q or T (SEQ ID NO: 87).

[0360] In some embodiments, the epitope is within amino acids D65 and N78 of canine IL4R ECD (SEQ ID NO: 99). For example, the epitope may comprise the amino acid sequence of SEQ ID NO: 354.

[0361] In some embodiments, a first epitope is within amino acids G24 and A56 of canine IL4R ECD (SEQ ID NO: 99) and a second epitope is within amino acids R79 and 190 of canine IL4R ECD. For example, the first epitope may comprise the amino acid sequence of SEQ ID NO: 355 and the second epitope may comprise the amino acid sequence of SEQ ID NO: 356.

[0362] In some embodiments, the epitope is within amino acids R79 and V98 of canine IL4R ECD (SEQ ID NO: 99). For example, the epitope may comprise the amino acid sequence of SEQ ID NO: 357.

[0363] The term “CDR” means a complementarity determining region as defined by at least one manner of identification to one of skill in the art. In some embodiments, CDRs can be defined in accordance with any of the Chothia numbering schemes, the Kabat numbering scheme, a combination of Kabat and Chothia, the AbM definition, the contact definition, or a combination of the Kabat, Chothia, AbM, or contact definitions. The various CDRs within an antibody can be designated by their appropriate number and chain type, including, without limitation as CDR-H1, CDR-H2, CDR-HC3, CDR-L1, CDR-L2, and CDR-L3. The term “CDR” is used herein to also encompass a “hypervariable region” or HVR, including hypervariable loops.

[0364] In some embodiments, an anti-IL4R antibody comprises a heavy chain comprising (a) a CDR-H1 comprising the amino acid sequence of SEQ ID NO: 1, SEQ ID NO: 7, or SEQ ID NO: 29; (b) a CDR-H2 comprising the amino acid sequence of SEQ ID NO: 2, SEQ ID NO: 268, SEQ ID NO: 8, SEQ ID NO: 269, SEQ ID NO: 30, SEQ ID NO: 271, or SEQ ID NO: 272; or (c) a CDR-H3 comprising the amino acid sequence of SEQ ID NO: 3, SEQ ID NO: 9, or SEQ ID NO: 31. In some embodiments, an anti-IL4R antibody comprises a light chain comprising (a) a CDR-L1 comprising the amino acid sequence of SEQ ID NO: 4, SEQ ID NO: 14, or SEQ ID NO: 36; (b) a CDR-L2 comprising the amino acid sequence of SEQ ID NO: 5, SEQ ID NO: 15, or SEQ ID NO: 37; or (c) a CDR-L3 comprising the amino acid sequence of SEQ ID NO: 6, SEQ ID NO: 16, or SEQ ID NO: 38.

[0365] In some embodiments, an anti-IL4R antibody comprises a heavy chain comprising (a) a CDR-H1 sequence having at least 85%, at least 90%, at least 95%, or at least 98% sequence identity to the amino acid sequence of SEQ ID NO: 1, SEQ ID NO: 7, or SEQ ID NO: 29; (b) a CDR-H2 sequence having at least 85%, at least 90%, at least 95%, or at least 98% sequence identity to the amino acid sequence of SEQ ID NO: 2, SEQ ID NO: 268, SEQ ID NO: 8, SEQ ID NO: 269, SEQ ID NO: 30, SEQ ID NO: 271, or SEQ ID NO: 272; or (c) a CDR-H3 sequence having at least 85%, at least 90%, at least 95%, or at least 98% sequence identity to the amino acid sequence of SEQ ID NO: 3, SEQ ID NO: 9, or SEQ ID NO: 31. In some embodiments, an anti-IL4R antibody comprises a light chain comprising (a) a CDR-L1 sequence having at least 85%, at least 90%, at least 95%, or at least 98% sequence identity to the amino acid sequence of SEQ ID NO: 4, SEQ ID NO: 14, or SEQ ID NO: 36; (b) a CDR-L2 sequence having at least 85%, at least 90%, at least 95%, or at least 98% sequence identity to the amino acid sequence of SEQ ID NO: 5, SEQ ID NO: 15, or SEQ ID NO: 37; or (c) a CDR-L3 sequence having at least 85%, at least 90%, at least 95%, or at least 98% sequence identity to the amino acid sequence of SEQ ID NO: 6, SEQ ID NO: 16, or SEQ ID NO: 38.

[0366] In some embodiments, an anti-IL4R antibody comprises a heavy chain comprising: a) a CDR-H1 sequence having at least 85%, at least 90%, at least 95%, at least 98%, or 100% sequence identity to the amino acid sequence of SEQ ID NO: 278; b) a CDR-H2 sequence having at least 85%, at least 90%, at least 95%, at least 98%, or 100% sequence identity to the amino acid sequence of SEQ ID NO: 279; and c) a CDR-H3 sequence having at least 85%, at least 90%, at least 95%, at least 98%, or 100% sequence identity to the amino acid sequence of SEQ ID NO: 280. In some embodiments, an anti-IL4R antibody comprises a light chain comprising: a) a CDR-L1 sequence having at least 85%, at least 90%, at least 95%, at least 98%, or 100% sequence identity to the amino acid sequence of SEQ ID NO: 285; b) a CDR-L2 sequence having at least 85%, at least 90%, at least 95%, at least 98%, or 100% sequence identity to the amino acid sequence of SEQ ID NO: 286; and c) a CDR-L3 sequence having at least 85%, at least 90%, at least 95%, at least 98%, or 100% sequence identity to the amino acid sequence of SEQ ID NO: 287.

[0367] In some embodiments, an anti-IL4R antibody comprises a heavy chain comprising: a) a CDR-H1 sequence having at least 85%, at least 90%, at least 95%, at least 98%, or 100% sequence identity to the amino acid sequence of SEQ ID NO: 310; b) a CDR-H2 sequence having at least 85%, at least 90%, at least 95%, at least 98%, or 100% sequence identity to the amino acid sequence of SEQ ID NO: 311; and c) a CDR-H3 sequence having at least 85%, at least 90%, at least 95%, at least 98%, or 100% sequence identity to the amino acid sequence of SEQ ID NO: 312. In some embodiments, an anti-IL4R antibody comprises a light chain comprising: a) a CDR-L1 sequence having at least 85%, at least 90%, at least 95%, at least 98%, or 100% sequence identity to the amino acid sequence of SEQ ID NO: 317; b) a CDR-L2 sequence having at least 85%, at least 90%, at least 95%, at least 98%, or 100% sequence identity to the amino acid sequence of SEQ ID NO: 318; and c) a CDR-L3 sequence having at least 85%, at least 90%, at least 95%, at least 98%, or 100% sequence identity to the amino acid sequence of SEQ ID NO: 319.

[0368] In some embodiments, an anti-IL4R antibody comprises a heavy chain comprising: a) a CDR-H1 sequence having at least 85%, at least 90%, at least 95%, at least 98%, or 100% sequence identity to the amino acid sequence of SEQ ID NO: 326; b) a CDR-H2 sequence having at least 85%, at least 90%, at least 95%, at least 98%, or 100% sequence identity to the amino acid sequence of SEQ ID NO: 327; and c) a CDR-H3 sequence having at least 85%, at least 90%, at least 95%, at least 98%, or 100% sequence identity to the amino acid sequence of SEQ ID NO: 328. In some embodiments, an anti-IL4R antibody comprises a light chain comprising a) a CDR-L1 sequence having at least 85%, at least 90%, at least 95%, at least 98%, or 100% sequence identity to the amino acid sequence of SEQ ID NO: 333; b) a CDR-L2 sequence having at least 85%, at least 90%, at least 95%, at least 98%, or 100% sequence identity to the amino acid sequence of SEQ ID NO: 334; and c) a CDR-L3 sequence having at least 85%, at least 90%, at least 95%, at least 98%, or 100% sequence identity to the amino acid sequence of SEQ ID NO: 335.

[0369] In some embodiments, an anti-IL4R antibody comprises a heavy chain comprising: a) a CDR-H1 sequence having at least 85%, at least 90%, at least 95%, at least 98%, or 100% sequence identity to the amino acid sequence of SEQ ID NO: 294; b) a CDR-H2 sequence having at least 85%, at least 90%, at least 95%, at least 98%, or 100% sequence identity to the amino acid sequence of SEQ ID NO: 295; and c) a CDR-H3 sequence having at least 85%, at least 90%, at least 95%, at least 98%, or 100% sequence identity to the amino acid sequence of SEQ ID NO: 296. In some embodiments, an anti-IL4R antibody comprises a light chain comprising: a) a CDR-L1 sequence having at least 85%, at least 90%, at least 95%, at least 98%, or 100% sequence identity to the amino acid sequence of SEQ ID NO: 301; b) a CDR-L2 sequence having at least 85%, at least 90%, at least 95%, at least 98%, or 100% sequence identity to the amino acid sequence of SEQ ID NO: 302; and c) a CDR-L3 sequence having at least 85%, at least 90%, at least 95%, at least 98%, or 100% sequence identity to the amino acid sequence of SEQ ID NO: 303.

[0370] The term “variable region” as used herein refers to a region comprising at least three CDRs. In some embodiments, the variable region includes the three CDRs and at least one framework region (“FR”). The terms “heavy chain variable region” or “variable heavy chain” are used interchangeably to refer to a region comprising at least three heavy chain CDRs. The terms “light chain variable region” or “variable light chain” are used interchangeably to refer to a region comprising at least three light chain CDRs. In some embodiments, the variable heavy chain or variable light chain comprises at least one framework region. In some embodiments, an antibody comprises at least one heavy chain framework region selected from HC-FR1, HC-FR2, HC-FR3, and HC-FR4. In some embodiments, an antibody comprises at least one light chain framework region selected from LC-FR1, LC-FR2, LC-FR3, and LC-FR4. The framework regions may be juxtaposed between light chain CDRs or between heavy chain CDRs. For example, an antibody may comprise a variable heavy chain having the following structure: (HC-FR1)-(HC-CDR1)-(HC-FR2)-(HC-CDR2)-(HC-FR3)-(HC-CDR3)-(HC-FR4). An antibody may comprise a variable heavy chain having the following structure: (HC-CDR1)-(HC-FR2)-(HC-CDR2)-(HC-FR3)-(HC-CDR3). An antibody may also comprise a variable light chain having the following structure: (LC-FR1)-(LC-CDR1)-(LC-FR2)-(LC-CDR2)-(LC-FR3)-(LC-CDR3)-(LC-FR4). An antibody may also comprise a variable light chain having the following structure: (LC-CDR1)-(LC-FR2)-(LC-CDR2)-(LC-FR3)-(LC-CDR3).

[0371] In some embodiments, an anti-IL4R antibody comprises one or more of (a) a variable region heavy chain framework 1 (HC-FR1) sequence of SEQ ID NO: 10 or SEQ ID NO: 32, (b) a HC-FR2 sequence of SEQ ID NO: 11 or SEQ ID NO: 33, (c) a HC-FR3 sequence of SEQ ID NO: 12, SEQ ID NO: 270, SEQ ID NO: 34, SEQ ID NO: 273, (d) a HC-FR4 sequence of SEQ ID NO: 13 or SEQ ID NO: 35, (e) a variable region light chain framework 1 (LC-FR1) sequence of SEQ ID NO: 17 or SEQ ID NO: 39, (f) an LC-FR2 sequence of SEQ ID NO: SEQ ID NO: 18 or SEQ ID NO: 40, (g) an LC-FR3 sequence of SEQ ID NO: 19 or SEQ ID NO: 41, or (h) an LC-FR4 sequence of SEQ ID NO: 20 or SEQ ID NO: 42.

[0372] In some embodiments, an anti-IL4R antibody comprises:

a. (i) a variable heavy chain sequence having at least 85%, at least 90%, at least 95%, at least 98%, or 100% sequence identity to the amino acid sequence of SEQ ID NO: 21 or SEQ ID NO: 43; (ii) a variable light chain sequence having at least 85%, at least 90%, at least 95%, at least 98%, or 100% sequence identity to the amino acid sequence of SEQ ID NO: 22 or SEQ ID NO: 44; or (iii) a variable heavy chain sequence as in (i) and a variable light chain sequence as in (ii); or
b. (i) a variable heavy chain sequence having at least 85%, at least 90%, at least 95%, at least 98%, or 100% sequence identity to the amino acid sequence of SEQ ID NO: 59, SEQ ID NO: 60, SEQ ID NO: 63, or SEQ ID NO: 64, or SEQ ID NO: 274; (ii) a variable light chain sequence having at least 85%, at least 90%, at least 95%, at least 98%, or 100% sequence identity to the amino acid sequence of SEQ ID NO: 61, SEQ ID NO: 62, SEQ ID NO: 65, or SEQ ID NO: 66, SEQ ID NO: 275; or (iii) a variable heavy chain sequence as in (i) and a variable light chain sequence as in (ii); or
c. (i) a variable heavy chain sequence having at least 85%, at least 90%, at least 95%, at least 98%, or 100% sequence identity to the amino acid sequence of SEQ ID NO: 67 or SEQ ID NO: 69; (ii) a variable light chain sequence having at least 85%, at least 90%, at least 95%, at least 98%, or 100% sequence identity to the amino acid sequence of SEQ ID NO: 68 or SEQ ID NO: 70; or (iii) a variable heavy chain sequence as in (i) and a variable light chain sequence as in (ii).

[0373] In some embodiments, an anti-IL4R antibody comprises a variable heavy chain sequence of SEQ ID NO: 21, SEQ ID NO: 43, SEQ ID NO: 59, SEQ ID NO: 60, SEQ ID NO: 63, SEQ ID NO: 64, SEQ ID NO: 274, SEQ ID NO: 67, or SEQ ID NO: 69 and/or a variable light chain sequence of (a) SEQ ID NO: 22, SEQ ID NO: 44, SEQ ID NO: 61, SEQ ID NO: 62, SEQ ID NO: 65, SEQ ID NO: 66, SEQ ID NO: 275, SEQ ID NO: 68, or SEQ ID NO: 70.

[0374] In some embodiments, an anti-IL4R antibody comprises a heavy chain sequence of SEQ ID NO: 25, SEQ ID NO: 47, SEQ ID NO: 51, SEQ ID NO: 53, SEQ ID NO: 55, SEQ ID NO: 71, SEQ ID NO: 72, SEQ ID NO: 73, SEQ ID NO: 74, SEQ ID NO: 79, SEQ ID NO: 80, SEQ ID NO: 82, or SEQ ID NO: 83 and/or a light chain sequence of SEQ ID NO: 26, SEQ ID NO: 48, SEQ ID NO: 52, SEQ ID NO: 54, SEQ ID NO: 56, SEQ ID NO: 73, SEQ ID NO: 74, SEQ ID NO: 77, SEQ ID NO: 78, SEQ ID NO: 277, SEQ ID NO: 81 or SEQ ID NO: 84.

[0375] In some embodiments, an anti-IL4R antibody comprises:

a. (i) a variable heavy chain sequence having at least 85%, at least 90%, at least 95%, at least 98%, or 100% sequence identity to the amino acid sequence of SEQ ID NO: 292; (ii) a variable light chain sequence having at least 85%, at least 90%, at least 95%, at least 98%, or 100% sequence identity to the amino acid sequence of SEQ ID NO: 293; or (iii) a variable heavy chain sequence as in (i) and a variable light chain sequence as in (ii); or
b. (i) a variable heavy chain sequence having at least 85%, at least 90%, at least 95%, at least 98%, or 100% sequence identity to the amino acid sequence of SEQ ID NO: 342 or SEQ ID NO: 343; (ii) a variable light chain sequence having at least 85%, at least 90%, at least 95%, at least 98%, or 100% sequence identity to the amino acid sequence of SEQ ID NO: 344; or (iii) a variable heavy chain sequence as in (i) and a variable light chain sequence as in (ii).

[0376] In some embodiments, an anti-IL4R antibody comprises:

a) a variable heavy chain sequence comprising the amino acid sequence of SEQ ID NO: 292, and a variable light chain sequence comprising the amino acid sequence of SEQ ID NO: 293; or
b) a variable heavy chain sequence comprising the amino acid sequence of SEQ ID NO: 342 or SEQ ID NO: 343, and a variable light chain sequence comprising the amino acid sequence of SEQ ID NO: 344.

[0377] In some embodiments, an anti-IL4R antibody comprises a variable heavy chain sequence of SEQ ID NO: 292, SEQ ID NO: 342, or SEQ ID NO: 343 and/or a variable light chain sequence of (a) SEQ ID NO: 293 or SEQ ID NO: 344.

[0378] In some embodiments, an anti-IL4R antibody comprises a heavy chain sequence of SEQ ID NO: SEQ ID NO: 348 or SEQ ID NO: 349 and/or a light chain sequence of SEQ ID NO: 350.

[0379] In some embodiments, an anti-IL4R antibody comprises: (a) a variable heavy chain sequence having at least 85%, at least 90%, at least 95%, at least 98%, or 100% sequence identity to the amino acid sequence of SEQ ID NO: 324; (b) a variable light chain sequence having at least 85%, at least 90%, at least 95%, at least 98%, or 100% sequence identity to the amino acid sequence of SEQ ID NO: 325; or (c) a variable heavy chain sequence as in (a) and a variable light chain sequence as in (b).

[0380] In some embodiments, an anti-IL4R antibody comprises a variable heavy chain sequence of SEQ ID NO: 324 and/or a variable light chain sequence of (a) SEQ ID NO: 325.

[0381] In some embodiments, an anti-IL4R antibody comprises a heavy chain sequence of SEQ ID NO: SEQ ID NO: 348 or SEQ ID NO: 349 and/or a light chain sequence of SEQ ID NO: 350.

[0382] In some embodiments, an anti-IL4R antibody comprises:

a. (i) a variable heavy chain sequence having at least 85%, at least 90%, at least 95%, at least 98%, or 100% sequence identity to the amino acid sequence of SEQ ID NO: 340; (ii) a variable light chain sequence having at least 85%, at least 90%, at least 95%, at least 98%, or 100% sequence identity to the amino acid sequence of SEQ ID NO: 341; or (iii) a variable heavy chain sequence as in (i) and a variable light chain sequence as in (ii); or
b. (i) a variable heavy chain sequence having at least 85%, at least 90%, at least 95%, at least 98%, or 100% sequence identity to the amino acid sequence of SEQ ID NO: 345 or SEQ ID NO: 346; (ii) a variable light chain sequence having at least 85%, at least 90%, at least 95%, at least 98%, or 100% sequence identity to the amino acid sequence of SEQ ID NO: 347; or (iii) a variable heavy chain sequence as in (i) and a variable light chain sequence as in (ii).

[0383] In some embodiments, an anti-IL4R antibody comprises a variable heavy chain sequence of SEQ ID NO: 340, SEQ ID NO: 345, or SEQ ID NO: 346 and/or a variable light chain sequence of (a) SEQ ID NO: 341 or SEQ ID NO: 347.

[0384] In some embodiments, an anti-IL4R antibody comprises a heavy chain sequence of SEQ ID NO: SEQ ID NO: 348 or SEQ ID NO: 349 and/or a light chain sequence of SEQ ID NO: 350.

[0385] In some embodiments, an anti-IL4R antibody comprises: The isolated antibody of any one of claims 75 to 85, wherein the antibody comprises: (a) a variable heavy chain sequence having at least 85%, at least 90%, at least 95%, at least 98%, or 100% sequence identity to the amino acid sequence of SEQ ID NO: 308; (b) a variable light chain sequence having at least 85%, at least 90%, at least 95%, at least 98%, or 100% sequence identity to the amino acid sequence of SEQ ID NO: 309; or (c) a variable heavy chain sequence as in (a) and a variable light chain sequence as in (b).

[0386] In some embodiments, an anti-IL4R antibody comprises a variable heavy chain sequence of SEQ ID NO: 308 and/or a variable light chain sequence of (a) SEQ ID NO: 341 or SEQ ID NO: 309.

[0387] The term “constant region” as used herein refers to a region comprising at least three constant domains. The terms “heavy chain constant region” or “constant heavy chain” are used interchangeably to refer to a region comprising at least three heavy chain constant domains, CH1, CH2, and CH3. Nonlimiting exemplary heavy chain constant regions include γ, δ, α, ε, and μ. Each heavy chain constant region corresponds to an antibody isotype. For example, an antibody comprising a γ constant region is an IgG antibody, an antibody comprising a δ constant region is an IgD antibody, an antibody comprising an α constant region is an IgA antibody, an antibody comprising a μ constant region is an IgM antibody, and an antibody comprising an ε constant region is an IgE antibody. Certain isotypes can be further subdivided into subclasses. For example, IgG antibodies include, but are not limited to, IgG1 (comprising a γ₁ constant region), IgG2 (comprising a γ₂ constant region), IgG3 (comprising a γ₃ constant region), and IgG4 (comprising a γ₄ constant region) antibodies; IgA antibodies include, but are not limited to, IgA1 (comprising an α₁ constant region) and IgA2 (comprising an α₂ constant region) antibodies; and IgM antibodies include, but are not limited to IgM1 and IgM2. The terms “light chain constant region” or “constant light chain” are used interchangeably to refer to a region comprising a light chain constant domain, CL. Nonlimiting exemplary light chain constant regions include λ and κ (e.g., SEQ ID NO: 235 or 241). Non-function-altering deletions and alterations within the domains are encompassed within the scope of the term “constant region” unless designated otherwise. Canine, feline, and equine have antibody classes such as IgG, IgA, IgD, IgE, and IgM. Within the canine IgG antibody class are IgG-A, IgG-B, IgG-C, and IgG-D. Within the feline IgG antibody class are IgG1a, IgG1b, and IgG2. Within the equine IgG antibody class are IgG1, IgG2, IgG3, IgG4, IgG5, IgG6, and IgG7.

[0388] A “fragment crystallizable polypeptide” or “Fc polypeptide” is the portion of an antibody molecule that interacts with effector molecules and cells. It comprises the C-terminal portions of the immunoglobulin heavy chains. As used herein, an Fc polypeptide includes fragments of the Fc domain having one or more biological activities of an entire Fc polypeptide. In some embodiments, a biological activity of an Fc polypeptide is the ability to bind FcRn. In some embodiments, a biological activity of an Fc polypeptide is the ability to bind C1q. In some embodiments, a biological activity of an Fc polypeptide is the ability to bind CD16. In some embodiments, a biological activity of an Fc polypeptide is the ability to bind protein A. An “effector function” of the Fc polypeptide is an action or activity performed in whole or in part by any antibody in response to a stimulus and may include complement fixation and/or ADCC (antibody-dependent cellular cytotoxicity) induction.

[0389] The term “IgX Fc” means the Fc region is derived from a particular antibody isotype (e.g., IgG, IgA, IgD, IgE, IgM, etc.), where “X” denotes the antibody isotype. Thus, “IgG Fc” denotes the Fc region of a γ chain, “IgA Fc” denotes the Fc region of an α chain, “IgD Fc” denotes the Fc region of a δ chain, “IgE Fc” denotes the Fc region of an ε chain, “IgM Fc” denotes the Fc region of a μ chain, etc. In some embodiments, the IgG Fc region comprises CH1, hinge, CH2, CH3, and CL1. “IgX-N-Fc” denotes that the Fc region is derived from a particular subclass of antibody isotype (such as canine IgG subclass A, B, C, or D; feline IgG subclass 1, 2a, or 2b; or equine IgG subclass IgG1, IgG2, IgG3, IgG4, IgG5, IgG6, or IgG7, etc.), where “N” denotes the subclass.

[0390] In some embodiments, an IgX Fc polypeptide or IgX-N-Fc polypeptide is derived from a companion animal, such as a dog, a cat, or a horse. In some embodiments, IgG Fc polypeptides are isolated from canine γ heavy chains, such as IgG-A, IgG-B, IgG-C, or IgG-D. In some instances, IgG Fe polypeptides are isolated from feline γ heavy chains, such as IgG1, IgG2a, or IgG2b. In other instances, IgG Fc polypeptides are isolated from equine γ heavy chains, such as IgG1, IgG2, IgG3, IgG4, IgG5, IgG6, or IgG7.

[0391] The terms “IgX Fc” and “IgX Fc polypeptide” include wild-type IgX Fc polypeptides and variant IgX Fc polypeptides, unless indicated otherwise.

[0392] “Wild-type” refers to a non-mutated version of a polypeptide that occurs in nature, or a fragment thereof. A wild-type polypeptide may be produced recombinantly.

[0393] In some embodiments, a wild-type IgG Fc polypeptide comprises the amino acid sequence of SEQ ID NO: 162, SEQ ID NO: 163, SEQ ID NO: 164, SEQ ID NO: 165, SEQ ID NO: 166, SEQ ID NO: 167, SEQ ID NO: 203, SEQ ID NO: 204, SEQ ID NO: 205, SEQ ID NO: 206, SEQ ID NO: 207, SEQ ID NO: 247, SEQ ID NO: 248, SEQ ID NO: 249, SEQ ID NO: 250, SEQ ID NO: 251, SEQ ID NO: 252, or SEQ ID NO: 253.

[0394] A “variant” is a polypeptide that differs from a reference polypeptide by single or multiple non-native amino acid substitutions, deletions, and/or additions. In some embodiments, a variant retains at least one biological activity of the reference polypeptide (e.g., wild-type polypeptide).

[0395] A “variant IgG Fc polypeptide” as used herein is an IgG Fc polypeptide that differs from a reference IgG Fc polypeptide by single or multiple amino acid substitutions, deletions, and/or additions and substantially retains at least one biological activity of the reference IgG Fc polypeptide.

[0396] In some embodiments, a variant IgG Fc polypeptide comprises a variant IgG Fc polypeptide of a companion animal species. In some embodiments, a variant IgG Fc polypeptide comprises a variant canine IgG Fc polypeptide, a variant equine IgG Fc polypeptide, or a feline IgG Fc polypeptide. In some embodiments, a variant IgG Fc polypeptide (e.g., a variant canine IgG-A Fc polypeptide, a variant canine IgG-C Fc polypeptide, a variant canine IgG-D Fc polypeptide, variant feline IgG1a Fc polypeptide, variant feline IgG1b Fc polypeptide, or variant feline IgG2 Fc polypeptide) has an activity that the reference (e.g., wild-type) polypeptide substantially lacks. For example, in some embodiments, a variant canine IgG-A Fc polypeptide, a variant canine IgG-C Fc polypeptide, or a variant canine IgG-D Fc polypeptide binds Protein A.

[0397] In some embodiments, a variant IgG Fc polypeptide has modified Protein A binding affinity. In some embodiments, a variant IgG Fc polypeptide has increased binding affinity to Protein A. In some embodiments, a variant IgG Fc polypeptide may be purified using Protein A column chromatography. In some embodiments, a variant IgG Fc polypeptide has modified CD16 binding affinity. In some embodiments, a variant IgG Fc polypeptide has decreased binding affinity to CD16. In some embodiments, a variant IgG Fc may have a reduced ADCC immune response. In some embodiments, a variant IgG Fc polypeptide has modified C1q binding affinity. In some embodiments, a variant IgG Fc polypeptide has reduced binding affinity to C1q. In some embodiments, a variant IgG Fc polypeptide may have reduced complement fixation. In some embodiments, a variant IgG Fc may have a reduced complement-mediated immune response.

[0398] “Hinge” refers to any portion of an Fc polypeptide or variant Fc polypeptide that is proline-rich, comprises at least one cysteine residue, and is located between CH1 and CH2 of a heavy chain constant region.

[0399] In some embodiments, a hinge is capable of forming a disulfide linkage within the same hinge region, within the same Fc polypeptide, with a hinge region of a separate Fc polypeptide, or with a separate Fc polypeptide. In some embodiments, a hinge comprises at least one, at least two, at least three, at least four, at least five, at least six, at least seven, at least eight, at least nine, or at least ten proline residues.

[0400] In some embodiments, a variant feline IgG Fc polypeptide has at least one additional inter-chain disulfide linkage relative to the wild-type feline IgG Fc polypeptide, such as in the hinge region. In some embodiments, a variant feline IgG2 Fc polypeptide with at least one additional inter-chain disulfide linkage has increased inter-chain stability relative to the wild-type feline IgG Fc polypeptide. In some embodiments, a variant IgG polypeptide has at least one amino acid modification to a hinge region relative to a wild-type IgG Fc polypeptide, such as a wild-type feline IgG Fc polypeptide.

[0401] In some embodiments, a variant IgG Fc polypeptide comprises a hinge region or a portion of a hinge region from an IgG Fc polypeptide of a different isotype. In some embodiments, the variant IgG Fc polypeptide, such as a canine IgG2 Fc polypeptide, comprises a hinge region from a wild-type feline IgG1a or IgG1b Fc polypeptide. In some embodiments, a variant IgG Fc polypeptide has increased recombinant production and/or increased hinge disulfide formation relative to the wild-type IgG Fc polypeptide. In some embodiments, the increased recombinant production and/or increased hinge disulfide formation can be determined by SDS-PAGE analysis under reducing and/or non-reducing conditions.

[0402] In some embodiments, a variant IgG Fc polypeptide comprises: a) at least one amino acid substitution at a position corresponding to position 21, 23, 25, 80, 205, and/or 207 of SEQ ID NO: 162; b) at least one amino acid substitution at a position corresponding to position 5, 38, 39, 94, 97, and/or 98 of SEQ ID NO: 163; c) at least one amino acid substitution at a position corresponding to position 5, 21, 23, 24, 38, 39, 93, 97, and/or 98 of SEQ ID NO: 165; d) at least one amino acid substitution at a position corresponding to position 21, 23, 25, 80, and/or 207 of SEQ ID NO: 167; e) at least one amino acid substitution at a position corresponding to position 16 and/or 198 of SEQ ID NO: 203, SEQ ID NO: 204, SEQ ID NO: 205, or SEQ ID NO: 206; and/or f) at least one amino acid substitution at a position corresponding to position 14 and/or 16 of SEQ ID NO: 207.

[0403] In some embodiments, a variant IgG Fc polypeptide comprises: a) at least one amino acid substitution at position 21, 23, 25, 80, 205, and/or 207 of SEQ ID NO: 162; b) at least one amino acid substitution at position 5, 38, 39, 94, 97, and/or 98 of SEQ ID NO: 163; c) at least one amino acid substitution at position 5, 21, 23, 24, 38, 39, 93, 97, and/or 98 of SEQ ID NO: 164; d) at least one amino acid substitution at position 21, 23, 25, 80, and/or 207 of SEQ ID NO: 165; e) at least one amino acid substitution at position 16 and/or 198 of SEQ ID NO: 203, SEQ ID NO: 204, SEQ ID NO: 205, or SEQ ID NO: 206; and/or f) at least one amino acid substitution at position 14 and/or 16 of SEQ ID NO: 207.

[0404] In some embodiments, a variant IgG Fc polypeptide comprises:

[0405] a) a threonine at a position corresponding to position 21, a leucine at a position corresponding to position 23, an alanine at a position corresponding to position 25, a glycine at a position corresponding to position 80, an alanine at a position corresponding to position 205, and/or a histidine at a position corresponding to position 207 of SEQ ID NO: 162;

[0406] b) a proline at a position corresponding to position 5, a glycine at a position corresponding to position 38, an arginine at a position corresponding to position 39, an arginine at a position corresponding to position 93, an isoleucine at a position corresponding to position 97, and/or a glycine at a position corresponding to position 98 of SEQ ID NO: 163;

[0407] c) a proline at a position corresponding to position 5, a threonine at a position corresponding to position 21, a leucine at a position corresponding to position 23, an isoleucine at a position corresponding to position 24, a glycine at a position corresponding to position 38, an arginine at a position corresponding to position 39, an arginine at a position corresponding to position 93, an isoleucine at a position corresponding to position 97, and/or a glycine at a position corresponding to position 98 of SEQ ID NO: 164;

[0408] d) a threonine at a position corresponding to position 21, a leucine at a position corresponding to position 23, an alanine at a position corresponding to position 25, a glycine at a position corresponding to position 80, and/or a histidine at a position corresponding to position 207 of SEQ ID NO: 165;

[0409] e) a proline at a position corresponding to position 16 and/or an alanine at a position corresponding to position 198 of SEQ ID NO: 203, SEQ ID NO: 204, SEQ ID NO: 205, or SEQ ID NO: 206; and/or

[0410] f) a cysteine at a position corresponding to position 14 and/or a proline at a position corresponding to position 16 of SEQ ID NO: 207.

[0411] In some embodiments, a variant IgG Fc polypeptide comprises:

[0412] a) a threonine at position 21, a leucine at position 23, an alanine at position 25, a glycine at position 80, an alanine at position 205, and/or a histidine at position 207 of SEQ ID NO: 162;

[0413] b) a proline at position 5, a glycine at position 38, an arginine at position 39, an arginine at position 93, an isoleucine at position 97, and/or a glycine at position 98 of SEQ ID NO: 163;

[0414] c) a proline at position 5, a threonine at position 21, a leucine at position 23, an isoleucine at position 24, a glycine at position 38, an arginine at position 39, an arginine at position 93, an isoleucine at position 97, and/or a glycine at position 98 of SEQ ID NO: 164;

[0415] d) a threonine at position 21, a leucine at position 23, an alanine at position 25, a glycine at position 80, and/or a histidine at position 207 of SEQ ID NO: 165;

[0416] e) a proline at position 16 and/or an alanine at position 198 of SEQ ID NO: 203, SEQ ID NO: 204, SEQ ID NO: 205, or SEQ ID NO: 206; and/or

[0417] f) a cysteine at position 14 and/or a proline at position 16 of SEQ ID NO: 207.

[0418] In some embodiments, a variant IgG Fc polypeptide comprises the amino acid sequence of SEQ ID NO: 168, 169, 170, 171, 172, 173, 174, 175, 176, 177, 178, 179, 180, 181, 182, 183, 184, 185, 186, 187, 188, 189, 190, 191, 192, 193, 194, 208, 209, 210, 211, 212, 213, 214, 215, or 216.

[0419] A bispecific antibody has a binding specificity for two different epitopes or target molecules. In some embodiments, a bispecific antibody binds two different epitopes of the same target molecule. Bispecific antibodies may be full length antibodies or antibody fragments.

[0420] In some embodiments, an antibody comprises a first variant IgG Fc polypeptide comprising a “knob” mutation and a second variant IgG Fc polypeptide comprising a “hole” mutation. Nonlimiting exemplary knob and hole mutations are described, for example, in Merchant, A. M. et al. An efficient route to human bispecific IgG. Nat Biotechnol, 16(7):677-81 (1998).

[0421] In some embodiments, a variant IgG Fc polypeptide comprises a knob mutation. In some embodiments, a variant IgG Fc polypeptide comprises an amino acid substitution at a position corresponding to position 138 of SEQ ID NO: 162; position 137 of SEQ ID NO: 163, position 137 of SEQ ID NO: 165; position 138 of SEQ ID NO: 167; position 154 of SEQ ID NO: 203, SEQ ID NO: 204, SEQ ID NO: 205, SEQ ID NO: 206, or SEQ ID NO: 207; or position 130 of SEQ ID NO: 247, SEQ ID NO: 248, SEQ ID NO: 249, SEQ ID NO: 250, SEQ ID NO: 251, SEQ ID NO: 252, or SEQ ID NO: 253. In some embodiments, a variant IgG Fc polypeptide comprises an amino acid substitution at position 138 of SEQ ID NO: 162; position 137 of SEQ ID NO: 163; position 137 of SEQ ID NO: 165; position 138 of SEQ ID NO: 167; position 154 of SEQ ID NO: 203, SEQ ID NO: 204, SEQ ID NO: 205, SEQ ID NO: 206, or SEQ ID NO: 207; or position 130 of SEQ ID NO: 247, SEQ ID NO: 248, SEQ ID NO: 249, SEQ ID NO: 250, SEQ ID NO: 251, SEQ ID NO: 252, or SEQ ID NO: 253. In some embodiments, a variant IgG Fc polypeptide comprises a tryptophan at a position corresponding to position 138 of SEQ ID NO: 162; position 137 of SEQ ID NO: 163; position 137 of SEQ ID NO: 165; position 138 of SEQ ID NO: 167, or position 154 of SEQ ID NO: 203, SEQ ID NO: 204, SEQ ID NO: 205, SEQ ID NO: 206, or SEQ ID NO: 207; or position 130 of SEQ ID NO: 247, SEQ ID NO: 248, SEQ ID NO: 249, SEQ ID NO: 250, SEQ ID NO: 251, SEQ ID NO: 252, or SEQ ID NO: 253. In some embodiments, a variant IgG Fc polypeptide comprises a tryptophan at position 138 of SEQ ID NO: 162; position 137 of SEQ ID NO: 163; position 137 of SEQ ID NO: 165; position 138 of SEQ ID NO: 167; position 154 of SEQ ID NO: 203, SEQ ID NO: 204, SEQ ID NO: 205, SEQ ID NO: 206, or SEQ ID NO: 207; or position 130 of SEQ ID NO: 247, SEQ ID NO: 248, SEQ ID NO: 249, SEQ ID NO: 250, SEQ ID NO: 251, SEQ ID NO: 252, or SEQ ID NO: 253. In some embodiments, a variant IgG Fc polypeptide comprises the amino acid sequence of SEQ ID NO: 195, 196, 197, 198, 217, 218, 219, 220, 221, 254, 255, 256, 257, 258, 259, or 260.

[0422] In some embodiments, a variant IgG Fc polypeptide comprises a hole mutation. In some embodiments, a variant IgG Fc polypeptide comprises an amino acid substitution at a position corresponding to position 138 and/or position 140 of SEQ ID NO: 162; position 137 and/or position 139 of SEQ ID NO: 163; position 137 and/or position 139 of SEQ ID NO: 165; position 138 and/or position 140 of SEQ ID NO: 167; position 154 and/or position 156 of SEQ ID NO: 203, SEQ ID NO: 204, SEQ ID NO: 205, SEQ ID NO: 206, or SEQ ID NO: 207; and/or position 130 and/or position 132 of SEQ ID NO: 247, SEQ ID NO: 248, SEQ ID NO: 249, SEQ ID NO: 250, SEQ ID NO: 251, SEQ ID NO: 252, or SEQ ID NO: 253. In some embodiments, a variant IgG Fc polypeptide comprises an amino acid substitution at position 138 and/or position 140 of SEQ ID NO: 162; position 137 and/or position 139 of SEQ ID NO: 163; position 137 and/or position 139 of SEQ ID NO: 165; position 138 and/or position 140 of SEQ ID NO: 167; position 154 and/or position 156 of SEQ ID NO: 203, SEQ ID NO: 204, SEQ ID NO: 205, SEQ ID NO: 206, or SEQ ID NO: 207; or position 130 and/or position 132 of SEQ ID NO: 247, SEQ ID NO: 248, SEQ ID NO: 249, SEQ ID NO: 250, SEQ ID NO: 251, SEQ ID NO: 252, or SEQ ID NO: 253. In some embodiments, a variant IgG Fc polypeptide comprises a serine at a position corresponding to position 138 and/or an alanine at a position corresponding to position 140 of SEQ ID NO: 162; a serine at a position corresponding to position 137 and/or an alanine at a position corresponding to position 139 of SEQ ID NO: 163; a serine at a position corresponding to position 137 and/or an alanine at a position corresponding to position 139 of SEQ ID NO: 165; a serine at a position corresponding to position 138 and/or an alanine at a position corresponding to position 140 of SEQ ID NO: 167; a serine at a position corresponding to position 154 and/or an alanine at a position corresponding to position 156 of SEQ ID NO: 203, SEQ ID NO: 204, SEQ ID NO: 205, SEQ ID NO: 206, or SEQ ID NO: 207; or a serine at a position corresponding to position 130 and/or an alanine at a position corresponding to position 132 of SEQ ID NO: 247, SEQ ID NO: 248, SEQ ID NO: 249, SEQ ID NO: 250, SEQ ID NO: 251, SEQ ID NO: 252, or SEQ ID NO: 253. In some embodiments, a variant IgG Fc polypeptide comprises a serine at position 138 and/or an alanine at position 140 of SEQ ID NO: 162; a serine at position 137 and/or an alanine at position 139 of SEQ ID NO: 163; a serine at position 137 and/or an alanine at position 139 of SEQ ID NO: 165; a serine at position 138 and/or an alanine at position 140 of SEQ ID NO: 167; a serine at position 154 and/or an alanine at position 156 of SEQ ID NO: 203, SEQ ID NO: 204, SEQ ID NO: 205, SEQ ID NO: 206, or SEQ ID NO: 207; or a serine at position 130 and/or an alanine at position 132 of SEQ ID NO: 247, SEQ ID NO: 248, SEQ ID NO: 249, SEQ ID NO: 250, SEQ ID NO: 251, SEQ ID NO: 252, or SEQ ID NO: 253. In some embodiments, a variant IgG Fc polypeptide comprises the amino acid sequence of SEQ ID NO: 199, 200, 201, 202, 222, 223, 224, 225, 226, 261, 262, 263, 264, 265, 266, or 267.

[0423] Furthermore, to facilitate a heavy chain to specifically pair with its intended light chain, interface amino acids between CH1 and the light chain may be mutated to be complementary in shape and charge-charge interaction.

[0424] In some embodiments, a variant IgG Fc polypeptide comprises a CH1 region comprising at least one amino acid substitution at a position corresponding to position 24 and/or position 30 of SEQ ID NO: 227, SEQ ID NO: 228, SEQ ID NO: 229, SEQ ID NO: 230, or SEQ ID NO: 237; or at least one amino acid substitution at a position corresponding to position 24 and/or position 29 of SEQ ID NO: 238. In some embodiments, a variant IgG Fc polypeptide comprises a CH1 region comprising at least one amino acid substitution at position 24 and/or position 30 of SEQ ID NO: 227, SEQ ID NO: 228, SEQ ID NO: 229, SEQ ID NO: 230, or SEQ ID NO: 237; or at least one amino acid substitution at position 24 and/or position 29 of SEQ ID NO: 238. In some embodiments, a variant IgG Fc polypeptide comprises a CH1 region comprising a leucine at a position corresponding to position 24 and/or an asparagine at a position corresponding to position 30 of SEQ ID NO: 227, SEQ ID NO: 228, SEQ ID NO: 229, SEQ ID NO: 230, or SEQ ID NO: 237; or a leucine at a position corresponding to position 24 and/or an asparagine at a position corresponding to position 29 of SEQ ID NO: 238. In some embodiments, a variant IgG Fc polypeptide comprises a CH1 region comprising a leucine at position 24 and/or an asparagine at position 30 of SEQ ID NO: 227, SEQ ID NO: 228, SEQ ID NO: 229, SEQ ID NO: 230, or SEQ ID NO: 237; or a leucine at position 24 and/or an asparagine at position 29 of SEQ ID NO: 238. In some embodiments, a variant IgG Fc polypeptide comprises a CH1 region comprising the amino acid sequence of SEQ ID NO: 231, 232, 233, 234, 239, or 240.

[0425] In some embodiments, a complementary variant light chain constant region comprises at least one amino acid substitution at a position corresponding to position 11 and/or position 22 of SEQ ID NO: 235 or SEQ ID NO: 241. In some embodiments, a variant light chain constant region comprises at least one amino acid substitution at position 11 and/or position 22 of SEQ ID NO: 235 or SEQ ID NO: 241. In some embodiments, a variant light chain constant region comprises an alanine at a position corresponding to position 11 and/or an arginine at a position corresponding to position 22 of SEQ ID NO: 235 or SEQ ID NO: 241. In some embodiments, a variant light chain constant region comprises an alanine at position 11 and/or an arginine at position 22 of SEQ ID NO: 235 or SEQ ID NO: 241. In some embodiments, a variant light chain constant region comprises the amino acid sequence of SEQ ID NO: 236 or 242.

[0426] The term “chimeric antibody” or “chimeric” refers to an antibody in which a portion of the heavy chain or light chain is derived from a particular source or species, while at least a part of the remainder of the heavy chain or light chain is derived from a different source or species. In some embodiments, a chimeric antibody refers to an antibody comprising at least one variable region from a first species (such as mouse, rat, cynomolgus monkey, etc.) and at least one constant region from a second species (such as human, dog, cat, equine, etc.). In some embodiments, a chimeric antibody comprises at least one mouse variable region and at least one canine constant region. In some embodiments, a chimeric antibody comprises at least one mouse variable region and at least one feline constant region. In some embodiments, all of the variable regions of a chimeric antibody are from a first species and all of the constant regions of the chimeric antibody are from a second species. In some embodiments, a chimeric antibody comprises α constant heavy chain region or constant light chain region from a companion animal. In some embodiments, a chimeric antibody comprises a mouse variable heavy and light chains and a companion animal constant heavy and light chains. For example, a chimeric antibody may comprise a mouse variable heavy and light chains and a canine constant heavy and light chains; a chimeric antibody may comprise a mouse variable heavy and light chains and a feline constant heavy and light chains; or a chimeric antibody may comprise a mouse variable heavy and light chains and an equine constant heavy and light chains.

[0427] A “canine chimeric” or “canine chimeric antibody” refers to a chimeric antibody having at least a portion of a heavy chain or a portion of a light chain derived from a dog. A “feline chimeric” or “feline chimeric antibody” refers to a chimeric antibody having at least a portion of a heavy chain or a portion of a light chain derived from a cat. In some embodiments, a canine chimeric antibody comprises a mouse variable heavy and light chains and a canine constant heavy and light chains. In some embodiments, a feline chimeric antibody comprises a mouse variable heavy and light chains and a feline constant heavy and light chains. In some embodiments, the antibody is a chimeric antibody comprising murine variable heavy chain framework regions or murine variable light chain framework regions.

[0428] In some embodiments, an anti-IL4R antibody comprises a chimeric antibody comprising: (i) a heavy chain amino acid sequence of SEQ ID NO: 51 or SEQ ID NO: 55; (ii) a light chain amino acid sequence of SEQ ID NO: 52 or SEQ ID NO: 56; or (iii) a heavy chain amino acid sequence as in (i) and a light chain sequence as in (ii).

[0429] A “canine antibody,” as used herein, encompasses antibodies produced in a canine; antibodies produced in non-canine animals that comprise canine immunoglobulin genes or comprise canine immunoglobulin peptides; or antibodies selected using in vitro methods, such as phage display, wherein the antibody repertoire is based on a canine immunoglobulin sequence. The term “canine antibody” denotes the genus of sequences that are canine sequences. Thus, the term is not designating the process by which the antibody was created, but the genus of sequences that are relevant.

[0430] A “caninized antibody” means an antibody in which at least one amino acid in a portion of a non-canine variable region has been replaced with the corresponding amino acid from a canine variable region. In some embodiments, a caninized antibody comprises at least one canine constant region (e.g., a γ constant region, an α constant region, a δ constant region, an c constant region, a μ constant region, or etc.) or fragment thereof. In some embodiments, a caninized antibody is an antibody fragment, such as Fab, scFv, (Fab′)₂, etc. The term “caninized” also denotes forms of non-canine (for example, murine) antibodies that are chimeric immunoglobulins, immunoglobulin chains, or fragments thereof (such as Fv, Fab, Fab′, F(ab′)₂ or other antigen-binding sequences of antibodies) that contain minimal sequence of non-canine immunoglobulin. Caninized antibodies can include canine immunoglobulins (recipient antibody) in which residues from a CDR of the recipient are substituted by residues from a CDR of a non-canine species (donor antibody) such as mouse, rat, or rabbit having the desired specificity, affinity, and capacity. In some instances, Fv framework region (FR) residues of the canine immunoglobulin are replaced by corresponding non-canine residues. Furthermore, the caninized antibody can comprise residues that are found neither in the recipient antibody nor in the imported CDR or framework sequences, but are included to further refine and optimize antibody performance.

[0431] In some embodiments, at least one amino acid residue in a portion of a mouse variable heavy chain or a mouse variable light chain has been replaced with the corresponding amino acid from a canine variable region. In some embodiments, the modified chain is fused to a canine constant heavy chain or a canine constant light chain. In some embodiments, an anti-IL4R antibody is a caninized antibody comprising a variable heavy chain amino acid sequence of SEQ ID NO: 59, 60, 63, or 64 and/or a variable light chain amino acid sequence of SEQ ID NO: 61, 62, 65, or 66.

[0432] In some embodiments, an anti-IL4R antibody comprises a canine heavy chain constant region selected from an IgG-A, IgG-B, IgG-C, and IgG-D constant region. In some embodiments, an anti-IL4R antibody comprises is a wild-type or variant canine IgG-A, IgG-B, IgG-C, or IgG-D Fc polypeptide, as described herein. In some embodiments, an anti-IL4R antibody comprises a canine IgG-A Fc polypeptide comprising the amino acid sequence of SEQ ID NO: 162; a canine IgG-B Fc polypeptide comprising the amino acid sequence of SEQ ID NO: 163 or 164; (c) a canine IgG-C Fc polypeptide comprising the amino acid sequence of SEQ ID NO: 165 or 166; or (d) a canine IgG-D Fc polypeptide comprising the amino acid sequence of SEQ ID NO: 167. In some embodiments, an anti-IL4R antibody comprises a variant canine IgG-A Fc polypeptide comprising the amino acid sequence of SEQ ID NO: 168, 169, 195, or 199; a variant canine IgG-B Fc polypeptide comprising the amino acid sequence of SEQ ID NO: 170, 171, 172, 173, 174, 175, 176, 177, 178, 179, 196, or 200; (c) a variant canine IgG-C Fc polypeptide comprising the amino acid sequence of SEQ ID NO: 180, 181, 182, 183, 184, 185, 186, 187, 188, 189, 190, 191, 192, 197, or 201; or (d) a variant canine IgG-D Fc polypeptide comprising the amino acid sequence of SEQ ID NO: 194, 198, or 202.

[0433] In some embodiments, an anti-IL4R antibody comprises a canine light chain constant region, such as a canine κ light constant region. In some embodiments, an anti-IL4R antibody comprises is a wild-type canine κ light constant region (e.g., SEQ ID NO: 235) or variant canine κ light constant region (e.g., SEQ ID NO: 236).

[0434] In some embodiments, an anti-IL4R antibody comprises a caninized variable heavy chain of Clone B, Clone I, M3, M5, M8, or M9 and a variant canine IgG Fc polypeptide, such as SEQ ID NO: 71, 72, 75, 76, 276, 348, 349, 351, or 352. In some embodiments, an anti-IL4R antibody comprises a caninized variable light chain of Clone B, Clone I, M3, M5, M8, or M9 and a wild-type canine κ light chain constant region, such as SEQ ID NO: 73, 74, 77, 78, 277, 350, or 352.

[0435] A “feline antibody,” as used herein, encompasses antibodies produced in a feline; antibodies produced in non-feline animals that comprise feline immunoglobulin genes or comprise feline immunoglobulin peptides; or antibodies selected using in vitro methods, such as phage display, wherein the antibody repertoire is based on a feline immunoglobulin sequence. The term “feline antibody” denotes the genus of sequences that are feline sequences. Thus, the term is not designating the process by which the antibody was created, but the genus of sequences that are relevant.

[0436] A “felinized antibody” means an antibody in which at least one amino acid in a portion of a non-feline variable region has been replaced with the corresponding amino acid from a feline variable region. In some embodiments, a felinized antibody comprises at least one feline constant region (e.g., a γ constant region, an α constant region, a δ constant region, an c constant region, a μ constant region, or etc.) or fragment thereof. In some embodiments, a felinized antibody is an antibody fragment, such as Fab, scFv, (Fab′)₂, etc. The term “felinized” also denotes forms of non-feline (for example, murine) antibodies that are chimeric immunoglobulins, immunoglobulin chains, or fragments thereof (such as Fv, Fab, Fab′, F(ab′)₂ or other antigen-binding sequences of antibodies) that contain minimal sequence of non-feline immunoglobulin. Felinized antibodies can include feline immunoglobulins (recipient antibody) in which residues from a CDR of the recipient are substituted by residues from a CDR of a non-feline species (donor antibody) such as mouse, rat, or rabbit having the desired specificity, affinity, and capacity. In some instances, Fv framework region (FR) residues of the feline immunoglobulin are replaced by corresponding non-feline residues. Furthermore, the felinized antibody can comprise residues that are found neither in the recipient antibody nor in the imported CDR or framework sequences, but are included to further refine and optimize antibody performance.

[0437] In some embodiments, at least one amino acid residue in a portion of a mouse variable heavy chain or a mouse variable light chain has been replaced with the corresponding amino acid from a feline variable region. In some embodiments, the modified chain is fused to a feline constant heavy chain or a feline constant light chain. In some embodiments, an anti-IL4R antibody is a felinized antibody comprising a variable heavy chain amino acid sequence of SEQ ID NO: 67 or 69 and/or a variable light chain amino acid sequence of SEQ ID NO: 68 or 70.

[0438] In some embodiments, an anti-IL4R antibody comprises a feline heavy chain constant region selected from an IgG1a, IgG1b, and IgG2 constant region. In some embodiments, an anti-IL4R antibody comprises is a wild-type or variant feline IgG1a, IgG1b, or IgG2 Fc polypeptide, as described herein. In some embodiments, an anti-IL4R antibody comprises a feline IgG1a Fc polypeptide comprising the amino acid sequence of SEQ ID NO: 203 or 204; a feline IgG1b Fc polypeptide comprising the amino acid sequence of SEQ ID NO: 205 or 206; or (c) a feline IgG2 Fc polypeptide comprising the amino acid sequence of SEQ ID NO: 207. In some embodiments, an anti-IL4R antibody comprises a variant feline IgG1a Fc polypeptide comprising the amino acid sequence of SEQ ID NO: 208, 209, 210, 217, 218, 222, or 223; a variant feline IgG1b Fc polypeptide comprising the amino acid sequence of SEQ ID NO: 211, 212, 213, 219, 220, 224, or 225; or (c) a variant feline IgG2 Fc polypeptide comprising the amino acid sequence of SEQ ID NO: 214, 215, 216, 221, or 226.

[0439] In some embodiments, an anti-IL4R antibody comprises a feline light chain constant region, such as a feline κ light constant region. In some embodiments, an anti-IL4R antibody comprises is a wild-type feline κ light constant region (e.g., SEQ ID NO: 241) or variant feline κ light constant region (e.g., SEQ ID NO: 242).

[0440] In some embodiments, an anti-IL4R antibody comprises a felinized variable heavy chain of Clone B or Clone I and a variant feline IgG Fc polypeptide, such as SEQ ID NO: 79, 80, 82, or 83. In some embodiments, an anti-IL4R antibody comprises a felinized variable light chain of Clone B or Clone I and a feline κ light chain constant region, such as SEQ ID NO: 81 or 84.

[0441] In some embodiments, an anti-IL4R antibody is a bispecific antibody having a binding specificity for IL4R and a different target molecule, such as IL17, IL31, TNFα, CD20, CD19, CD25, IL4, IL13, IL23, IgE, CD11α, IL6R, α4-Intergrin, IL12, IL1β, or BlyS. In some embodiments, a bispecific antibody comprises a caninized or felinized Clone B or Clone I variable heavy chain and a “knob” variant canine or feline IgG Fc polypeptide that can pair with a variant κ constant region (e.g., SEQ ID NO: 243). In some embodiments, a bispecific antibody comprises a variable heavy chain directed to a different target molecule (e.g., canine or feline IL31) and a “hole” variant canine or feline IgG Fc polypeptide (e.g., SEQ ID NO: 245). In some embodiments, a bispecific antibody comprises a caninized or felinized Clone B or Clone I variable light chain and a variable κ constant region that can pair with the knob Fc polypeptide (e.g., SEQ ID NO: 244). In some embodiments, a bispecific antibody comprises a variable light chain directed to a different target molecule (e.g., canine or feline IL31) and a wild-type κ constant region that can pair with the hole Fc polypeptide (e.g., SEQ ID NO: 246).

[0442] Other bispecific antibody arrangements may be prepared. For example, in some embodiments, a bispecific antibody comprises a caninized or felinized Clone B or Clone I variable heavy chain and a “hole” variant canine or feline IgG Fc polypeptide that can pair with a variant κ constant region. In some embodiments, a bispecific antibody comprises a variable heavy chain directed to a different target molecule (e.g., canine or feline IL31) and a “knob” variant canine or feline IgG Fc polypeptide. In some embodiments, a bispecific antibody comprises a caninized or felinized Clone B or Clone I variable light chain and a variable κ constant region that can pair with the hole Fc polypeptide. In some embodiments, a bispecific antibody comprises a variable light chain directed to a different target molecule (e.g., canine or feline IL31) and a wild-type κ constant region that can pair with the knob Fc polypeptide.

[0443] The term “affinity” means the strength of the sum total of noncovalent interactions between a single binding site of a molecule (for example, an antibody) and its binding partner (for example, an antigen). The affinity of a molecule X for its partner Y can generally be represented by the dissociation constant (K_{D}). Affinity can be measured by common methods known in the art, such as, for example, immunoblot, ELISA KD, KinEx A, biolayer interferometry (BLI), or surface plasmon resonance devices.

[0444] The terms “K_{D},” “K_{d},” “Kd” or “Kd value” as used interchangeably to refer to the equilibrium dissociation constant of an antibody-antigen interaction. In some embodiments, the K_{d} of the antibody is measured by using biolayer interferometry assays using a biosensor, such as an Octet® System (Pall ForteBio LLC, Fremont, Calif.) according to the supplier's instructions. Briefly, biotinylated antigen is bound to the sensor tip and the association of antibody is monitored for ninety seconds and the dissociation is monitored for 600 seconds. The buffer for dilutions and binding steps is 20 mM phosphate, 150 mM NaCl, pH 7.2. A buffer only blank curve is subtracted to correct for any drift. The data are fit to a 2:1 binding model using ForteBio data analysis software to determine association rate constant (kₒₙ), dissociation rate constant (k_{off}), and the K_{d}. The equilibrium dissociation constant (K_{d}) is calculated as the ratio of k_{off}/kₒₙ. The term “kₒₙ” refers to the rate constant for association of an antibody to an antigen and the term “k_{off}” refers to the rate constant for dissociation of an antibody from the antibody/antigen complex.

[0445] The term “binds” to an antigen or epitope is a term that is well understood in the art, and methods to determine such binding are also well known in the art. A molecule is said to exhibit “binding” if it reacts, associates with, or has affinity for a particular cell or substance and the reaction, association, or affinity is detectable by one or more methods known in the art, such as, for example, immunoblot, ELISA KD, KinEx A, biolayer interferometry (BLI), surface plasmon resonance devices, or etc.

[0446] “Surface plasmon resonance” denotes an optical phenomenon that allows for the analysis of real-time biospecific interactions by detection of alterations in protein concentrations within a biosensor matrix, for example using the BIAcore™ system (BIAcore International AB, a GE Healthcare company, Uppsala, Sweden and Piscataway, N.J.). For further descriptions, see Jonsson et al. (1993) Ann. Biol. Clin. 51: 19-26.

[0447] “Biolayer interferometry” refers to an optical analytical technique that analyzes the interference pattern of light reflected from a layer of immobilized protein on a biosensor tip and an internal reference layer. Changes in the number of molecules bound to the biosensor tip cause shifts in the interference pattern that can be measured in real-time. A nonlimiting exemplary device for biolayer interferometry is an Octet® system (Pall ForteBio LLC). See, e.g., Abdiche et al., 2008, Anal. Biochem. 377: 209-277.

[0448] In some embodiments, an anti-IL4R antibody binds to canine IL4R or feline IL4R with a dissociation constant (Kd) of less than 5×10⁻⁶ M, less than 1×10⁻⁶ M, less than 5×10⁻⁷ M, less than 1×10⁻⁷ M, less than 5×10⁻⁸ M, less than 1×10⁻⁸ M, less than 5×10⁻⁹ M, less than 1×10⁻⁹ M, less than 5×10⁻¹⁰ M, less than 1×10⁻¹⁰ M, less than 5×10⁻¹¹ M, less than 1×10⁻¹¹ M, less than 5×10⁻¹² M, or less than 1×10⁻¹² M, as measured by biolayer interferometry. In some embodiments, an anti-IL4R antibody binds to canine IL4R or feline IL4R with a Kd of between 5×10⁻⁶ M and 1×10⁻⁶ M, between 5×10⁻⁶ M and 5×10⁻⁷ M, between 5×10⁻⁶ M and 1×10⁻⁷ M, between 5×10⁻⁶ M and 5×10⁻⁸ M, 5×10⁻⁶ M and 1×10⁻⁸ M, between 5×10⁻⁶ M and 5×10⁻⁹ M, between 5×10⁻⁶ M and 1×10⁻⁹ M, between 5×10⁻⁶ M and 5×10⁻¹⁰ M, between 5×10⁻⁶ M and 1×10⁻¹⁰ M, between 5×10⁻⁶ M and 5×10⁻¹¹ M, between 5×10⁻⁶ M and 1×10⁻¹¹ M, between 5×10⁻⁶ M and 5×10⁻¹² M, between 5×10⁻⁶ M and 1×10⁻¹² M, between 1×10⁻⁶ M and 5×10⁻⁷ M, between 1×10⁻⁶ M and 1×10⁻⁷ M, between 1×10⁻⁶ M and 5×10⁻⁸ M, 1×10⁻⁶ M and 1×10⁻⁸ M, between 1×10⁻⁶ M and 5×10⁻⁹ M, between 1×10⁻⁶ M and 1×10⁻⁹ M, between 1×10⁻⁶ M and 5×10⁻¹⁰ M, between 1×10⁻⁶ M, between 1×10⁻¹⁰ M, between 1×10⁻⁶ M and 5×10⁻¹¹ M, between 1×10⁻⁶ M and 1×10⁻¹¹ M, between 1×10⁻⁶ M and 5×10⁻¹² M, between 1×10⁻⁶ M and 1×10⁻¹² M, between 5×10⁻⁷ M and 1×10⁻⁷ M, between 5×10⁻⁷ M and 5×10⁻⁸ M, 5×10⁻⁷ M and 1×10⁻⁸ M, between 5×10⁻⁷ M and 5×10⁻⁹ M, between 5×10⁻⁷ M and 1×10⁻⁹ M, between 5×10⁻⁷ M and 5×10⁻¹⁰ M, between 5×10⁻⁷ M and 1×10⁻¹⁰ M, between 5×10⁻⁷ M and 5×10⁻¹¹ M, between 5×10⁻⁷ M and 1×10⁻¹¹ M, between 5×10⁻⁷ M and 5×10⁻¹² M, between 5×10⁻⁷ M and 1×10⁻¹² M, between 1×10⁻⁷ M and 5×10⁻⁸ M, 1×10⁻⁷ M and 1×10⁻⁸ M, between 1×10⁻⁷ M and 5×10⁻⁹ M, between 1×10⁻⁷ M and 1×10⁻⁹ M, between 1×10⁻⁷ M and 5×10⁻¹⁰ M, between 1×10⁻⁷ M and 1×10⁻¹⁰ M, between 1×10⁻⁷ M and 5×10⁻¹¹ M, between 1×10⁻⁷ M and 1×10⁻¹¹ M, between 1×10⁻⁷ M and 5×10⁻¹² M, between 1×10⁻⁷ M and 1×10⁻¹² M, between 5×10⁻⁸ M and 1×10⁻⁸ M, between 5×10⁻⁸ M and 5×10⁻⁹ M, between 5×10⁻⁸ M and 1×10⁻⁹ M, between 5×10⁻⁸ M and 5×10⁻¹⁰ M, between 5×10⁻⁸ M and 1×10⁻¹⁰ M, between 5×10⁻⁸ M and 5×10⁻¹¹ M, between 5×10⁻⁸ M and 1×10⁻¹¹ M, between 5×10⁻⁸ M and 5×10¹² M, between 5×10⁻⁸ M and 1×10⁻¹² M, 1×10⁻⁸ M and 5×10⁻⁹ M, between 1×10⁻⁸ M and 1×10⁻⁹ M, between 1×10⁻⁸ M and 5×10⁻¹⁰ M, between 1×10⁻⁸ M and 1×10⁻¹⁰ M, between 1×10⁻⁸ M and 5×10⁻¹¹ M, between 1×10⁻⁸ M and 1×10⁻¹¹ M, between 1×10⁻⁸ M and 5×10⁻¹² M, between 1×10⁻⁸ M and 1×10⁻¹² M, between 5×10⁻⁹ M and 1×10⁻⁹ M, between 5×10⁻⁹ M and 5×10⁻¹⁰ M, between 5×10⁻⁹ M and 1×10⁻¹⁰ M, between 5×10⁻⁹ M and 5×10⁻¹¹ M, between 5×10⁻⁹ M and 1×10⁻¹¹ M, between 5×10⁻⁹ M and 5×10⁻¹² M, between 5×10⁻⁹ M and 1×10⁻¹² M, between 1×10⁻⁹ M and 5×10⁻¹⁰ M, between 1×10⁻⁹ M and 1×10⁻¹⁰ M, between 1×10⁻⁹ M and 5×10⁻¹¹ M, between 1×10⁻⁹ M and 1×10⁻¹¹ M, between 1×10⁻⁹ M and 5×10⁻¹² M, between 1×10⁻⁹ M and 1×10⁻¹² M, between 5×10⁻¹⁰ M and 1×10⁻¹⁰ M, between 5×10⁻¹⁰ M and 5×10⁻¹¹ M, between, 1×10⁻¹⁰ M and 5×10⁻¹¹ M, 1×10⁻¹⁰ M and 1×10⁻¹¹ M, between 1×10⁻¹⁰ M and 5×10⁻¹² M, between 1×10⁻¹⁰ M and 1×10⁻¹² M, between 5×10⁻¹¹ M and 1×10⁻¹² M, between 5×10⁻¹¹ M and 5×10⁻¹² M, between 5×10⁻¹¹ M and 1×10⁻¹² M, between 1×10⁻¹¹ M and 5×10⁻¹² M, or between 1×10⁻¹¹ M and 1×10⁻¹² M, as measured by biolayer interferometry. In some embodiments, an anti-IL4R antibody binds to canine IL4R or feline IL4R, as determined by immunoblot analysis.

[0449] In some embodiments, an anti-IL4R antibody is provided that competes with an anti-IL4R antibody described herein (such as Clone B or Clone I) for binding to IL4R. In some embodiments, an antibody that competes with binding with any of the antibodies provided herein can be made or used. In some embodiments, an anti-IL4R antibody is provided that competes with monoclonal Clone B or Clone I antibody in binding to canine IL4R or feline IL4R.

[0450] The term “vector” is used to describe a polynucleotide that can be engineered to contain a cloned polynucleotide or polynucleotides that can be propagated in a host cell. A vector can include one or more of the following elements: an origin of replication, one or more regulatory sequences (such as, for example, promoters or enhancers) that regulate the expression of the polypeptide of interest, or one or more selectable marker genes (such as, for example, antibiotic resistance genes and genes that can be used in colorimetric assays, for example, β-galactosidase). The term “expression vector” refers to a vector that is used to express a polypeptide of interest in a host cell.

[0451] A “host cell” refers to a cell that may be or has been a recipient of a vector or isolated polynucleotide. Host cells may be prokaryotic cells or eukaryotic cells. Exemplary eukaryotic cells include mammalian cells, such as primate or non-primate animal cells; fungal cells, such as yeast; plant cells; and insect cells. Nonlimiting exemplary mammalian cells include, but are not limited to, NS0 cells, PER.C6® cells (Crucell), 293 cells, and CHO cells, and their derivatives, such as 293-6E, DG44, CHO-S, and CHO-K cells. Host cells include progeny of a single host cell, and the progeny may not necessarily be completely identical (in morphology or in genomic DNA complement) to the original parent cell due to natural, accidental, or deliberate mutation. A host cell includes cells transfected in vivo with a polynucleotide(s) encoding an amino acid sequence(s) provided herein.

[0452] The term “isolated” as used herein refers to a molecule that has been separated from at least some of the components with which it is typically found in nature or produced. For example, a polypeptide is referred to as “isolated” when it is separated from at least some of the components of the cell in which it was produced. Where a polypeptide is secreted by a cell after expression, physically separating the supernatant containing the polypeptide from the cell that produced it is considered to be “isolating” the polypeptide. Similarly, a polynucleotide is referred to as “isolated” when it is not part of the larger polynucleotide (such as, for example, genomic DNA or mitochondrial DNA, in the case of a DNA polynucleotide) in which it is typically found in nature, or is separated from at least some of the components of the cell in which it was produced, for example, in the case of an RNA polynucleotide. Thus, a DNA polynucleotide that is contained in a vector inside a host cell may be referred to as “isolated.” In some embodiments, the anti-IL4R antibody is purified using chromatography, such as size exclusion chromatography, ion exchange chromatography, protein A column chromatography, hydrophobic interaction chromatography, and CHT chromatography.

[0453] The term “companion animal species” refers to an animal suitable to be a companion to humans. In some embodiments, a companion animal species is a small mammal, such as a canine, feline, dog, cat, horse, rabbit, ferret, guinea pig, rodent, etc. In some embodiments, a companion animal species is a farm animal, such as a horse, cow, pig, etc.

[0454] To “reduce” or “inhibit” means to decrease, reduce, or arrest an activity, function, or amount as compared to a reference. In some embodiments, by “reduce” or “inhibit” is meant the ability to cause an overall decrease of 20% or greater. In some embodiments, by “reduce” or “inhibit” is meant the ability to cause an overall decrease of 50% or greater. In some embodiments, by “reduce” or “inhibit” is meant the ability to cause an overall decrease of 75%, 85%, 90%, 95%, or greater. In some embodiments, the amount noted above is inhibited or decreased over a period of time, relative to a control dose (such as a placebo) over the same period of time. A “reference” as used herein, refers to any sample, standard, or level that is used for comparison purposes. A reference may be obtained from a healthy or non-diseased sample. In some examples, a reference is obtained from a non-diseased or non-treated sample of a companion animal. In some examples, a reference is obtained from one or more healthy animals of a particular species, which are not the animal being tested or treated.

[0455] The term “substantially reduced,” as used herein, denotes a sufficiently high degree of reduction between a numeric value and a reference numeric value such that one of skill in the art would consider the difference between the two values to be of statistical significance within the context of the biological characteristic measured by said values. In some embodiments, the substantially reduced numeric values is reduced by greater than about any one of 10%, 15% 20%, 25%, 30%, 35%, 40%, 45%, 50%, 60%, 70%, 80%, 90%, or 100% compared to the reference value.

[0456] The terms “pharmaceutical formulation” and “pharmaceutical composition” refer to a preparation which is in such form as to permit the biological activity of the active ingredient(s) to be effective, and which contains no additional components that are unacceptably toxic to a subject to which the formulation would be administered.

[0457] A “pharmaceutically acceptable carrier” refers to a non-toxic solid, semisolid, or liquid filler, diluent, encapsulating material, formulation auxiliary, or carrier conventional in the art for use with a therapeutic agent that together comprise a “pharmaceutical composition” for administration to a subject. A pharmaceutically acceptable carrier is non-toxic to recipients at the dosages and concentrations employed and is compatible with other ingredients of the formulation. The pharmaceutically acceptable carrier is appropriate for the formulation employed. Examples of pharmaceutically acceptable carriers include alumina; aluminum stearate; lecithin; serum proteins, such as human serum albumin, canine or other animal albumin; buffers such as phosphate, citrate, tromethamine or HEPES buffers; glycine; sorbic acid; potassium sorbate; partial glyceride mixtures of saturated vegetable fatty acids; water; salts or electrolytes, such as protamine sulfate, disodium hydrogen phosphate, potassium hydrogen phosphate, sodium chloride, zinc salts, colloidal silica, or magnesium trisilicate; polyvinyl pyrrolidone, cellulose-based substances; polyethylene glycol; sucrose; mannitol; or amino acids including, but not limited to, arginine.

[0458] The pharmaceutical composition can be stored in lyophilized form. Thus, in some embodiments, the preparation process includes a lyophilization step. The lyophilized composition may then be reformulated, typically as an aqueous composition suitable for parenteral administration, prior to administration to the dog, cat, or horse. In other embodiments, particularly where the antibody is highly stable to thermal and oxidative denaturation, the pharmaceutical composition can be stored as a liquid, i.e., as an aqueous composition, which may be administered directly, or with appropriate dilution, to the dog, cat, or horse. A lyophilized composition can be reconstituted with sterile Water for Injection (WFI). Bacteriostatic reagents, such benzyl alcohol, may be included. Thus, the invention provides pharmaceutical compositions in solid or liquid form.

[0459] The pH of the pharmaceutical compositions may be in the range of from about pH 5 to about pH 8, when administered. The compositions of the invention are sterile if they are to be used for therapeutic purposes. Sterility can be achieved by any of several means known in the art, including by filtration through sterile filtration membranes (e.g., 0.2 micron membranes). Sterility may be maintained with or without anti-bacterial agents.

[0460] The antibodies or pharmaceutical compositions comprising the antibodies of the invention may be useful for treating an IL4/IL13-induced condition. As used herein, an “IL4/IL13-induced condition” means a disease associated with, caused by, or characterized by, elevated levels or altered gradients of IL4/IL13 concentration. Such IL4/IL13-induced conditions include, but are not limited to, a pruritic or an allergic disease. In some embodiments, the IL4/IL13-induced condition is atopic dermatitis, allergic dermatitis, pruritus, asthma, psoriasis, scleroderma, or eczema. An IL4/IL13-induced condition may be exhibited in a companion animal, including, but not limited to, canine or feline.

[0461] As used herein, “treatment” is an approach for obtaining beneficial or desired clinical results. “Treatment” as used herein, covers any administration or application of a therapeutic for disease in a mammal, including a companion animal. For purposes of this disclosure, beneficial or desired clinical results include, but are not limited to, any one or more of: alleviation of one or more symptoms, diminishment of extent of disease, preventing or delaying spread of disease, preventing or delaying recurrence of disease, delay or slowing of disease progression, amelioration of the disease state, inhibiting the disease or progression of the disease, inhibiting or slowing the disease or its progression, arresting its development, and remission (whether partial or total). Also encompassed by “treatment” is a reduction of pathological consequence of a proliferative disease. The methods provided herein contemplate any one or more of these aspects of treatment. In-line with the above, the term treatment does not require one-hundred percent removal of all aspects of the disorder.

[0462] In some embodiments, an anti-IL4R antibody or a pharmaceutical composition comprising an anti-IL4R antibody can be utilized in accordance with the methods herein to treat IL4/IL13-induced conditions. In some embodiments, an anti-IL4R antibody or a pharmaceutical composition comprising an anti-IL4R antibody is administered to a companion animal, such as a canine or feline, to treat an IL4/IL13-induced condition.

[0463] A “therapeutically effective amount” of a substance/molecule, agonist or antagonist may vary according to factors such as the type of disease to be treated, the disease state, the severity and course of the disease, the type of therapeutic purpose, any previous therapy, the clinical history, the response to prior treatment, the discretion of the attending veterinarian, age, sex, and weight of the animal, and the ability of the substance/molecule, agonist or antagonist to elicit a desired response in the animal. A therapeutically effective amount is also one in which any toxic or detrimental effects of the substance/molecule, agonist or antagonist are outweighed by the therapeutically beneficial effects. A therapeutically effective amount may be delivered in one or more administrations. A therapeutically effective amount refers to an amount effective, at dosages and for periods of time necessary, to achieve the desired therapeutic or prophylactic result.

[0464] In some embodiments, an anti-IL4R antibody or pharmaceutical composition comprising an anti-IL4R antibody is administered parenterally, by subcutaneous administration, intravenous infusion, or intramuscular injection. In some embodiments, an anti-IL4R antibody or pharmaceutical composition comprising an anti-IL4R antibody is administered as a bolus injection or by continuous infusion over a period of time. In some embodiments, an anti-IL4R antibody or pharmaceutical composition comprising an anti-IL4R antibody is administered by an intramuscular, an intraperitoneal, an intracerebrospinal, a subcutaneous, an intra-arterial, an intrasynovial, an intrathecal, or an inhalation route.

[0465] Anti-IL4R antibodies described herein may be administered in an amount in the range of 0.1 mg/kg body weight to 100 mg/kg body weight per dose. In some embodiments, anti-IL4R antibodies may be administered in an amount in the range of 0.5 mg/kg body weight to 50 mg/kg body weight per dose. In some embodiments, anti-IL4R antibodies may be administered in an amount in the range of 1 mg/kg body weight to 10 mg/kg body weight per dose. In some embodiments, anti-IL4R antibodies may be administered in an amount in the range of 0.5 mg/kg body weight to 100 mg/kg body, in the range of 1 mg/kg body weight to 100 mg/kg body weight, in the range of 5 mg/kg body weight to 100 mg/kg body weight, in the range of 10 mg/kg body weight to 100 mg/kg body weight, in the range of 20 mg/kg body weight to 100 mg/kg body weight, in the range of 50 mg/kg body weight to 100 mg/kg body weight, in the range of 1 mg/kg body weight to 10 mg/kg body weight, in the range of 5 mg/kg body weight to 10 mg/kg body weight, in the range of 0.5 mg/kg body weight to 10 mg/kg body weight, or in the range of 5 mg/kg body weight to 50 mg/kg body weight.

[0466] An anti-IL4R antibody or a pharmaceutical composition comprising an anti-IL4R antibody can be administered to a companion animal at one time or over a series of treatments. For example, an anti-IL4R antibody or a pharmaceutical composition comprising an anti-IL4R antibody may be administered at least once, more than once, at least twice, at least three times, at least four times, or at least five times.

[0467] In some embodiments, the dose is administered once per week for at least two or three consecutive weeks, and in some embodiments, this cycle of treatment is repeated two or more times, optionally interspersed with one or more weeks of no treatment. In other embodiments, the therapeutically effective dose is administered once per day for two to five consecutive days, and in some embodiments, this cycle of treatment is repeated two or more times, optionally interspersed with one or more days or weeks of no treatment.

[0468] Administration “in combination with” one or more further therapeutic agents includes simultaneous (concurrent) and consecutive or sequential administration in any order. The term “concurrently” is used herein to refer to administration of two or more therapeutic agents, where at least part of the administration overlaps in time or where the administration of one therapeutic agent falls within a short period of time relative to administration of the other therapeutic agent. For example, the two or more therapeutic agents are administered with a time separation of no more than about a specified number of minutes. The term “sequentially” is used herein to refer to administration of two or more therapeutic agents where the administration of one or more agent(s) continues after discontinuing the administration of one or more other agent(s), or wherein administration of one or more agent(s) begins before the administration of one or more other agent(s). For example, administration of the two or more therapeutic agents are administered with a time separation of more than about a specified number of minutes. As used herein, “in conjunction with” refers to administration of one treatment modality in addition to another treatment modality. As such, “in conjunction with” refers to administration of one treatment modality before, during or after administration of the other treatment modality to the animal.

[0469] In some embodiments, the method comprises administering in combination with an anti-IL4R antibody or a pharmaceutical composition comprising an anti-IL4R antibody, a Jak inhibitor, a Tyk2 inhibitor, a PI3K inhibitor, ERK inhibitor. In some embodiments, the method comprises administering in combination with an anti-IL4R antibody or a pharmaceutical composition comprising an anti-IL4R antibody, an anti-IL31 antibody, an anti-IL17 antibody, an anti-TNFα antibody, an anti-CD20 antibody, an anti-CD19 antibody, an anti-CD25 antibody, an anti-IL4 antibody, an anti-IL13 antibody, an anti-IL23 antibody, an anti-IgE antibody, an anti-CD11α antibody, anti-IL6R antibody, anti-α4-Intergrin antibody, an anti-IL12 antibody, an anti-IL1β antibody, or an anti-BlyS antibody.

[0470] Provided herein are methods of exposing to a cell an anti-IL4R antibody or a pharmaceutical composition comprising an anti-IL4R antibody under conditions permissive for binding of the antibody to IL4R. In some embodiments, the cell is a canine cell, a feline cell, or an equine cell. In some embodiments, the cell is a canine DH82 cell. In some embodiments, the cell is exposed to the antibody or pharmaceutical composition ex vivo. In some embodiments, the cell is exposed to the antibody or pharmaceutical composition in vivo. In some embodiments, a cell is exposed to the anti-IL4R antibody. In some embodiments, a cell is exposed to the anti-IL4R antibody or the pharmaceutical composition under conditions permissive for binding of the antibody to extracellular IL4R. In some embodiments, a cell may be exposed in vivo to the anti-IL4R antibody or the pharmaceutical composition by any one or more of the administration methods described herein, including but not limited to, intraperitoneal, intramuscular, intravenous injection into the subject. In some embodiments, a cell may be exposed ex vivo to the anti-IL4R antibody or the pharmaceutical composition by exposing the cell to a culture medium comprising the antibody or the pharmaceutical composition. In some embodiments, the permeability of the cell membrane may be affected by the use of any number of methods understood by those of skill in the art (such as electroporating the cells or exposing the cells to a solution containing calcium chloride) before exposing the cell to a culture medium comprising the antibody or the pharmaceutical composition.

[0471] Provided herein are methods of using the anti-IL4R antibodies, polypeptides and polynucleotides for detection, diagnosis and monitoring of an IL4R-induced condition. Provided herein are methods of determining whether a companion animal will respond to anti-IL4R antibody therapy. In some embodiments, the method comprises detecting whether the animal has cells that express IL4R using an anti-IL4R antibody. In some embodiments, the method of detection comprises contacting the sample with an antibody, polypeptide, or polynucleotide and determining whether the level of binding differs from that of a reference or comparison sample (such as a control). In some embodiments, the method may be useful to determine whether the antibodies or polypeptides described herein are an appropriate treatment for the subject animal.

[0472] In some embodiments, the sample is a biological sample. The term “biological sample” means a quantity of a substance from a living thing or formerly living thing. In some embodiments, the biological sample is a cell or cell/tissue lysate. In some embodiments, the biological sample includes, but is not limited to, blood, (for example, whole blood), plasma, serum, urine, synovial fluid, and epithelial cells.

[0473] In some embodiments, the cells or cell/tissue lysate are contacted with an anti-IL4R antibody and the binding between the antibody and the cell is determined. When the test cells show binding activity as compared to a reference cell of the same tissue type, it may indicate that the subject would benefit from treatment with an anti-IL4R antibody. In some embodiments, the test cells are from tissue of a companion animal.

[0474] Various methods known in the art for detecting specific antibody-antigen binding can be used. Exemplary immunoassays which can be conducted include fluorescence polarization immunoassay (FPIA), fluorescence immunoassay (FIA), enzyme immunoassay (EIA), nephelometric inhibition immunoassay (NIA), enzyme linked immunosorbent assay (ELISA), and radioimmunoassay (RIA). An indicator moiety, or label group, can be attached to the subject antibodies and is selected so as to meet the needs of various uses of the method which are often dictated by the availability of assay equipment and compatible immunoassay procedures. Appropriate labels include, without limitation, radionuclides (for example ¹²⁵I, ¹³¹I, ³⁵S, ³H, or ³²P), enzymes (for example, alkaline phosphatase, horseradish peroxidase, luciferase, or β-galactosidase), fluorescent moieties or proteins (for example, fluorescein, rhodamine, phycoerythrin, GFP, or BFP), or luminescent moieties (for example, Qdot™ nanoparticles supplied by the Quantum Dot Corporation, Palo Alto, Calif.). General techniques to be used in performing the various immunoassays noted above are known to those of ordinary skill in the art.

[0475] For purposes of diagnosis, the polypeptide including antibodies can be labeled with a detectable moiety including but not limited to radioisotopes, fluorescent labels, and various enzyme-substrate labels know in the art. Methods of conjugating labels to an antibody are known in the art. In some embodiments, the anti-IL4R antibodies need not be labeled, and the presence thereof can be detected using a second labeled antibody which binds to the first anti-IL4R antibody. In some embodiments, the anti-IL4R antibody can be employed in any known assay method, such as competitive binding assays, direct and indirect sandwich assays, and immunoprecipitation assays. Zola, Monoclonal Antibodies: A Manual of Techniques, pp. 147-158 (CRC Press, Inc. 1987). The anti-IL4R antibodies and polypeptides can also be used for in vivo diagnostic assays, such as in vivo imaging. Generally, the antibody or the polypeptide is labeled with a radionuclide (such as ¹¹¹Tc, ¹⁴Tc, ¹³¹I, ¹²⁵I, ³H, or any other radionuclide label, including those outlined herein) so that the cells or tissue of interest can be localized using immunoscintiography. The antibody may also be used as staining reagent in pathology using techniques well known in the art.

[0476] In some embodiments, a first antibody is used for a diagnostic and a second antibody is used as a therapeutic. In some embodiments, the first and second antibodies are different. In some embodiments, the first and second antibodies can both bind to the antigen at the same time, by binding to separate epitopes.

[0477] Provided herein are methods for screening for a molecule that inhibits IL4 and/or IL13 signaling function comprising exposing to a canine DH82 cell the molecule and detecting whether there is a reduction in STATE phosphorylation. In some embodiments, the molecule comprises an anti-IL4R antibody or small molecule antagonist of IL4R. In some embodiments, the molecule comprises an anti-IL4R antibody or small molecule antagonist of IL13R. In some embodiments, the molecule comprises an anti-IL4R antibody or small molecule antagonist of IL4. In some embodiments, the molecule comprises an anti-IL4R antibody or small molecule antagonist of IL13.

[0478] The following examples illustrate particular aspects of the disclosure and are not intended in any way to limit the disclosure.

### EXAMPLES

### Example 1

### Preparation of IL4 and IL4R ECD Reagents

[0479] Nucleotide sequences encoding fusion proteins comprising (1) either full length canine IL4R (SEQ ID NO: 94), a canine, feline, equine, murine, or human IL4R ECDs (SEQ ID NO: 99, 100, 101, 102, or 103), or a canine, feline, or equine IL4 (SEQ ID NOs: 121, 122, or 123), (2) one or more His6, human Fc, and/or FLAG tag, (3) one or more linker sequences, and (4) a leader sequence were synthesized and cloned into separate mammalian expression plasmids. The plasmids were separately transfected into 293 cells, cultured, and supernatants containing secreted IL4R ECD or IL4 fusion polypeptides were separately collected and filtered. The poly-His fusion proteins were affinity purified using Ni-NTA column (GE Healthcare Life Sciences) and human Fc fusion proteins were affinity purified using CaptivA® Protein A Affinity Resin (Repligen). The purified fusion proteins were confirmed by SDS-PAGE analysis (data not shown). The fusion proteins (before and after processing) are summarized in Table 3, below.

TABLE 3

| SEQ ID | |
|---|---|
| NO: | Description |
| 104 | Canine IL4R_C-FLAG (with leader) |
| 105 | Canine IL4R_C-FLAG (processed) |
| 106 | Canine IL4R-EDC_C-His6 (with leader) |
| 107 | Canine IL4R-EDC_C-His6 (processed) |
| 108 | Canine IL4R-EDC_C-HuFc_His6 (with leader) |
| 109 | Canine IL4R-EDC_C-HuFc_His6 (processed) |
| 110 | Feline IL4R-EDC_C-HuFc_His6 (with leader) |
| 111 | Feline IL4R-EDC_C-HuFc_His6 (processed) |
| 112 | Equine IL4R-EDC_C-HuFc_His6 (with leader) |
| 113 | Equine IL4R-EDC_C-HuFc_His6 (processed) |
| 114 | Murine IL4R-EDC_C-HuFc_His6 (with leader) |
| 115 | Murine IL4R-EDC_C-HuFc_His6 (processed) |
| 116 | Human IL4R-EDC_C-HuFc_His6 (with leader) |
| 117 | Human IL4R-EDC_C-HuFc_His6 (processed) |
| 124 | Canine IL4_N-His6 (with leader) |
| 125 | Canine IL4_N-His6 (processed) |
| 126 | Canine IL4_C-His6 (with leader) |
| 127 | Canine IL4_C-His6 (processed) |
| 128 | Feline IL4_C-His6 (with leader) |
| 129 | Feline IL4_C-His6 (processed) |
| 130 | Equine IL4_C-His6 (with leader) |
| 131 | Equine IL4_C-His6 (processed) |
| 156 | Canine IL13_C-His6 (with leader) |
| 157 | Canine IL13_C-His6 (processed) |
| 158 | Feline IL13_C-His6 (with leader) |
| 159 | Feline IL13_C-His6 (processed) |

### Example 2

### Identification of Mouse Monoclonal Antibodies that Bind to Canine IL4R

[0480] Mouse monoclonal antibodies were identified following standard immunization with purified canine IL4R-ECD_C-His6 (SEQ ID NO: 107) as immunogen. Different adjuvants were used during immunizations (Akesobio, Inc, China) and monoclonal antibodies were obtained through standard hybridoma technology.

[0481] Enzyme linked immunosorbent assay (ELISA) was developed to screen for clones that produce IL4R binding antibodies. First, biotinylated IL4R-ECD_C-His6 (SEQ ID NO: 107) was introduced into streptavidin-coated wells. Immunized serum was then added to the wells followed by washing and detection with HRP-conjugated anti-mouse antibodies. The presence of canine IL4R binding antibodies developed a positive signal. Over 121 ELISA-positive top clones were identified.

[0482] The 121 antibody clones were screened for the ability to block interaction between canine IL4 and canine IL4R ECD by ELISA. Canine IL4R-ECD_C-HuFc_His6 (SEQ ID NO: 109) was immobilized to wells coated with anti-human Fc. Hybridoma supernatant was added, followed by biotinylated canine IL4_C-His6 (SEQ ID NO: 127), and then Streptavidin-HRP. Diminished signal suggested reduced interaction between canine IL4R ECD and canine IL4. Eleven clones were identified and designated as Clones A, B, C, D, E, F, G, H, I, J, and K. Each of the clones was further cultured and the IgG antibodies produced were purified using standard Protein A affinity chromatography.

[0483] The binding of each clone to canine IL4R ECD was confirmed by biosensor assay (Forte Bio Octet). First, biotinylated canine IL4R-ECD_C-His6 (SEQ ID NO: 107) was bound to streptavidin sensor tips. Then, binding of each of the eleven antibody clones to the canine IL4R-ECD-bound sensor tip was assessed.

### Example 3

### Clone B and Clone I Antibodies Block Binding of IL4 to Canine IL4R

[0484] The eleven antibodies were evaluated by biosensor assay (Forte Bio Octet) for the ability of an antibody-IL4R ECD complex to reduce binding of ligand canine IL4. Biotinylated canine IL4R-ECD_C-His6 (SEQ ID NO: 107) was captured on streptavidin sensor tips. IL4R ECD-bound tips were separately exposed to each of the eleven murine antibodies (Clones A, B, C, D, E, F, G, H, I, J, and K) at 20 μg/mL to form IL4R ECD-antibody binary complexes. The complex-bound tips were then exposed to canine IL4_C-His6 (SEQ ID NO: 127) at a high concentration (240 μg/mL). Canine IL4R ECD-antibody complexes of Clones B and I failed to bind to canine IL4, suggesting that both Clones B and I are neutralizing antibodies.

### Example 4

### Identification of DNA Sequences Encoding VH and VL of Monoclonal Antibodies

[0485] Hybridoma Clones B and I were pelleted, and total RNA was extracted. Oligonucleotide primers for amplifying mouse immunoglobulin (Ig) variable domains were used to obtain cDNA using standard techniques. The heavy and light chains of each clone were sequenced and analyzed by sequence alignment (FIG. 1A and FIG. 1B, respectively). Exemplary CDR sequences of Clone B were identified as SEQ ID NOs 7-9 and 14-16 and of Clone I were identified as SEQ ID NOs 29-31 and 36-38. Exemplary consensus CDR sequences were identified as CDR-H1: GYTFTSYVMH (SEQ ID NO: 1), CDR-H2: YINPX₁NDGTFYNGX₂X₃X₄G (SEQ ID NO: 2), wherein X₁ is K or A, X₂ K or A, X₃ is F or V, and X₄ is K or Q, or YINPX₁NDGT, wherein X₁ is K or A (SEQ ID NO: 268); CDR-H3: FX₅YGX₆AY (SEQ ID NO: 3), wherein X₅ is N or Y, and X₆ s I or F, CDR-L1: RASQEISGYLS (SEQ ID NO: 4); CDR-L2: AASX₇X₈DX₉ (SEQ ID NO: 5), wherein X₇ is T or N, X₈ is R or L, and X₉ is S or T; and CDR-L3: VQYASYPWT (SEQ ID NO: 6).

### Example 5

### Expression and Purification of Anti-IL4R-mAb Clone B and I

[0486] Nucleotide sequences encoding full length Clone B and I heavy and light chain polypeptides with leader sequences (SEQ ID NOs 27, 28, 49, and 50) were chemically synthesized and cloned into separate expression vectors suitable for transfection into a CHO host cell. Clone B and Clone I vectors were transfected into separate CHO host cells and cultured. Clone B and Clone I antibodies were purified from the culture medium by single step Protein A column chromatography.

[0487] Thermostability of Clone B and I antibodies as a function of pH was measured by differential scanning fluorimetry (DSF). The melting temperature (Tm) of each antibody at the different pHs is listed in Table 4, below. Buffer and 12 μg of antibody were mixed together with 1X Protein thermal shift dye (Applied Biosystem, Catalog No. 4461146). A melting curve was performed with StepOne Real Time PCR System (Applied Biosystem, Catalog No. 4376357). The temperature was increased from 25° C. to 99° C. with a ramp rate of 1% according to the manufacturer's instructions. The data was analyzed by Protein Thermal Shift™ Software v1.0 (Applied Biosystem, Catalog No. 4466038) to determine the Tm, which was calculated as the highest value derived from taking the first derivative of the protein melting curve.

TABLE 4

| pH | Assay | Clone B | Clone I |
|---|---|---|---|
| Tested | buffer | Tm (° C.) | Tm (° C.) |
| 4.5 | 0.1 M NaAc | 58.5 | 59.2 |
| 6 | 0.1 M NaPO₄ | 65.1 | 65.6 |
| 7.5 | 0.1 M NaPO₄ | 66.5 | 67.8 |
| 9 | 0.1 M TrisHCl | 66.7 | 67.1 |

### Example 6

### Demonstration of Canine IL4R Binding Activity

[0488] Clone B and I antibodies each exhibited affinity to canine IL4R with kinetics potentially sufficient for therapeutic activity. The binding analysis was performed using an Octet Biosensor as follows. Briefly, canine IL4R-ECD_C-His6 (SEQ ID NO: 107) was biotinylated through amine chemistry. The free unreacted biotin was removed by extensive dialysis. Biotinylated canine IL4R-ECD_C-His6 was captured on streptavidin sensor tips. The association of either Clone B or I antibody and canine IL4R-ECD_C-His6 (25 μg/mL) was monitored for 600 seconds. Dissociation was monitored for 600 seconds. A buffer only blank curve was subtracted to correct for any drift. The data were fit to a 1:1 binding model using ForteBio™ data analysis software to determine the kₒₙ, k_{off}, and the Kd. The buffer for dilutions and all binding steps was 20 mM phosphate, 150 mM NaCl, pH 7.2. The Kd of Clone B antibody and canine IL4R-ECD_C-His6 was 2.03×10⁻⁹ M and of Clone I antibody and canine IL4R-ECD_C-His6 was 1.79×10⁻⁹ M.

[0489] An alternative binding assay was performed also using an Octet Biosensor. Canine IL4R-ECD_C-HuFc_His6 (SEQ ID NO: 109) was captured on anti-human Fc-bound sensor tips. The association of either Clone B or I antibody and canine IL4R-ECD_C-HuFc_His6 was monitored for 600 seconds. Dissociation was monitored for 600 seconds. The buffer for dilutions and all binding steps was 20 mM phosphate, 150 mM NaCl, pH 7.2. The Kd of Clone B antibody and canine IL4R-ECD_C-HuFc_His6 was about 10⁻¹⁰ M and of Clone I antibody and canine IL4R-ECD_C-HuFc_His6 was 2.75×10⁻¹⁰ M. The increased affinity observed with the second assay may be due to increased avidity of Clone B and I antibodies for canine IL4R-ECD_C-HuFc_His6 over canine IL4R-ECD_C-His6. In addition, amine conjugation may affect the affinity of canine IL4R-ECD_C-His6 to interact with Clone B and I antibodies.

### Example 7

### Clone B and I Antibodies Compete for the Same IL4R Epitope Group

[0490] Epitope binding analysis was performed using an Octet Biosensor. Canine IL4R-ECD_C-HuFc_His6 (SEQ ID NO: 109) was captured on anti-human Fc-bound sensor tips. The association of Clone B antibody (50 μg/mL) and canine IL4R-ECD_C-HuFc_His6 was monitored for 600 seconds. The complex-bound tips were washed briefly and then exposed to Clone I antibody (50 μg/mL). After the wash step and exposure to Clone I antibody, no further association for canine IL4R-ECD_C-HuFc_His6 was observed (FIG. 2A), suggesting that Clone B and I antibodies bind to same epitope group. The opposite binding assay was also performed. The association between Clone I antibody (50 μg/mL) and canine IL4R-ECD_C-HuFc_His6 captured on anti-human Fc-bound sensor tips was monitored for 600 seconds. The complex-bound tips were washed briefly and then exposed to Clone B antibody (50 μg/mL). After the wash step and exposure to Clone B antibody, no further association for canine IL4R-ECD_C-HuFc_His6 was observed (FIG. 2B), again suggesting that Clone B and Clone I antibodies bind to same epitope group.

### Example 8

### Clone B and Clone I Antibodies Block IL4 and IL13 Binding to IL4R

[0491] Various binding analyses of Clone B, Clone I, canine IL4, and canine IL13 ligands to canine IL4R were performed using an Octet Biosensor. Canine IL4R-ECD_C-HuFc_His6 (SEQ ID NO: 109) was captured on anti-human Fc-bound sensor tips. The association of Clone B or Clone I antibody (25 μg/mL) and canine IL4R-ECD_C-HuFc_His6 was monitored for 600 seconds. The complex-bound tips were washed briefly and then exposed to canine IL4_C-His6 (SEQ ID NO: 127; 50 μg/mL) or canine IL13_C-His6 (SEQ ID NO: 157; 50 μg/mL) and monitored for 600 seconds. Little to no binding of canine IL4 (FIG. 3A) or canine IL13 (FIG. 3B) was observed, suggesting that Clone B and I antibodies block the binding of canine IL4 and canine IL13 to canine IL4R.

[0492] The opposite binding assay was also performed. The association between canine IL4_C-His6 (SEQ ID NO: 127; 50 μg/mL) or canine IL13_C-His6 (SEQ ID NO: 157; 50 μg/mL) and canine IL4R-ECD_C-HuFc_His6 captured on anti-human Fc-bound sensor tips was monitored for 600 seconds. The complex-bound tips were washed briefly and then exposed to Clone B antibody (50 μg/mL) or Clone I antibody (50 μg/mL) and monitored for 600 seconds. Following IL4 and IL13 binding to IL4R (FIG. 3C and FIG. 3D, respectively), further association with Clone B or Clone I was observed. These results suggest that Clone B and Clone I each have a higher affinity for IL4R than either canine IL4 or canine IL13.

### Example 9

### Immunoreactivity of Clone B and I Antibodies to IL4R by Western Analysis

[0493] The ability of Clone B and I antibodies to recognize canine IL4R-ECD_C-HuFc_His6 (SEQ ID NO: 109) by Western blot was investigated. Purified canine IL4R-ECD_C-HuFc_His6 was separated by SDS-PAGE under reducing conditions (in the presence of DTT) or non-reducing conditions (absence of DTT). The proteins were transferred to a PVDF membrane and probed using either Clone B or I antibody followed by goat anti-mouse IgG-HRP. Immunoreactive positive signals with Clone B and I antibodies were only observed with samples under non-reducing conditions, suggesting that disulfide binding may be important for maintaining epitope conformation and that the epitope for Clone B and I antibodies may be discontinuous or conformational.

[0494] Cross-reactivity of Clone I antibody to feline, equine, murine, and human IL4R was also investigated. Canine IL4R-ECD_C-HuFc_His6 (SEQ ID NO: 109), feline IL4R-ECD_C-HuFc_His6 (SEQ ID NO: 111), equine IL4R-ECD_C-HuFc_His6 (SEQ ID NO: 113), murine IL4R-ECD_C-HuFc_His6 (SEQ ID NO: 115), and human IL4R-ECD_C-HuFc_His6 (SEQ ID NO: 117) (0.1 μg/lane) were each separated by SDS-PAGE under reducing (+DTT) or non-reducing (−DTT) conditions. The proteins were transferred to PVDF membranes and the blots were probed with Clone I antibody (0.3 μg/mL) and visualized by goat anti-mouse IgG-HRP (FIG. 4A). As a control, the blot was stripped and probed with goat anti-human IgG Fc-HRP to visualize the presence of the IL4R-ECD proteins (FIG. 4B). Clone I antibody immunoreacted with canine IL4R-ECD_C-HuFc_His6 and to a lesser extent with feline IL4R-ECD_C-HuFc_His6 under non-reducing conditions (FIG. 4A, lanes 5 and 1, respectively). Low background reactivity was observed with equine, murine, and human IL4R-ECD_C-HuFc_His6 fusion polypeptides (FIG. 4A, lanes 2, 3, and 4, respectively).

### Example 10

### Feline IL4R Binding Affinity

[0495] The immunoblot assay detected slightly reduced binding between Clone I and feline IL4R-ECD_C-HuFc_His6 compared to binding between Clone I and canine IL4R-ECD_C-HuFc_His6. This finding was consistent with in vitro binding affinity measured by Octet Biosensor. Biotinylated feline IL4R-ECD_C-HuFc_His6 (SEQ ID NO: 111) was captured on streptavidin sensor tips. The association of Clone I antibody (25 μg/mL) and feline IL4R-ECD_C-HuFc_His6 was monitored for 600 seconds. Dissociation was monitored for 600 seconds. A buffer only blank curve was subtracted to correct for any drift. The data were fit to a 1:1 binding model using ForteBio™ data analysis software to determine the kₒₙ, k_{off}, and the Kd. The buffer for dilutions and all binding steps was 20 mM phosphate, 150 mM NaCl, pH 7.2. The Kd of Clone I antibody and feline IL4R-ECD_C-HuFc_His6 was 1.1×10⁻⁹ M.

### Example 11

### Identification of Canine IL4R Binding Epitope for Clone I Antibody

[0496] The canine IL4R epitope that is recognized by Clone I antibody (and presumably also by Clone B antibody) was investigated. Since Clone I antibody exhibited a low background of cross reactivity with human IL4R-ECD, numerous hybrid proteins of canine IL4R ECD (SEQ ID NO: 99) and human IL4R ECD (SEQ ID NO: 103) sequences were designed with a leader sequence (SEQ ID NO: 132) and a C-terminal human Fc-His6 tag to facilitate canine IL4R epitope mapping. Canine and human ECD sequences were divided into three segments (A, B, and C) and six different hybrid polypeptide constructs were prepared based on those segments in the order of A to C (see FIG. 5A and Table 5, below).

TABLE 5

| Hybrid | SEQ | Canine IL4R ECD | Human IL4R ECD | FIG. 4 |
|---|---|---|---|---|
| IL4R | ID NO: | segment(s) | segment(s) | Lane |
| Hybrid 1 | 133 | A (G1-N55) | B and C (N56-H209) | 3 |
| Hybrid 2 | 134 | B (R56-H109) | A and C | 4 |
| | | | (G1-N55, T110-H209) | |
| Hybrid 3 | 135 | C (P110-P204) | A and B (G1-H109) | 5 |
| Hybrid 4 | 136 | A and B (G1-H109) | C (T110-H209) | 6 |
| Hybrid 5 | 137 | B and C (R56-P204) | A (G1-N55) | 7 |
| Hybrid 6 | 138 | A and C (G1-N55, | B (N56-H109) | 8 |
| | | P110-P204) | | |

[0497] Plasmid constructs containing nucleotide sequences encoding each of Hybrid 1-6 polypeptides were transiently transfected into 293 cells and the supernatants concentrated 3-fold. Each fusion polypeptide was separated by SDS-PAGE under non-reducing (−DTT) conditions and the proteins transferred to a PVDF membrane. The blot was probed using Clone I antibody (FIG. 5B) or anti-human Fc antibody as a control (FIG. 5C). The presence of both canine IL4R ECD segments A and B gave the strongest signal (Hybrid 4, FIG. 5B, lane 6). Canine IL4R ECD segment A alone (Hybrid 1, FIG. 5B, lane 3) or with segment C (Hybrid 6, FIG. 5B, lane 8) gave appreciable signal, suggesting that segment A may contain the major epitope. Whereas segment B alone (Hybrid 2, FIG. 5B, lane 4) or with segment C (Hybrid 5, FIG. 5B, lane 7) gave a weaker signal, suggesting that segment B may contain an accessary (or minor) epitope.

[0498] Based on this information, additional hybrid proteins of canine IL4R ECD (SEQ ID NO: 99) and human IL4R ECD (SEQ ID NO: 103) sequences were designed with a leader sequence (SEQ ID NO: 132) and C-terminal human Fc-His6 tag to further localize the canine IL4R epitope(s). Segments A and B of canine and human ECD sequences were further divided and an additional eight hybrid polypeptide constructs (Hybrids 7-14) were prepared based on increasing amino acid residue number of either canine or human sequences (see FIG. 6A and Table 6, below).

TABLE 6

| Hybrid | SEQ ID | Canine IL4R ECD | Human IL4R ECD | FIG. 5 |
|---|---|---|---|---|
| IL4R | NO: | segment(s) | segment(s) | Lane |
| Hybrid 7 | 139 | C31-P204 | G1-N30 | 3 |
| Hybrid 8 | 140 | G1-N30 and R56-P204 | C31-N55 | 4 |
| Hybrid 9 | 141 | G1-N30 and D42-P204 | C31-L41 | 5 |
| Hybrid 10 | 142 | G1-L41 and R56-P204 | V42-N55 | 6 |
| Hybrid 11 | 143 | G1-N55 and E72-P204 | N56-V71 | 7 |
| Hybrid 12 | 144 | G1-V71 and G90-P204 | S72-K89 | 8 |
| Hybrid 13 | 145 | G1-S89 and P110-P204 | G90-H109 | 9 |
| Hybrid 14 | 146 | G1467 and S95-P204 | D68-P94 | 10 |

[0499] Plasmid constructs containing nucleotide sequences encoding each of Hybrid 7-14 polypeptides were transiently transfected into 293 cells and the supernatants concentrated 3-fold. Each hybrid polypeptide was separated by SDS-PAGE under non-reducing (−DTT) conditions and the proteins transferred to a PVDF membrane. The blot was probed using Clone I antibody (FIG. 6B) or anti-human Fc antibody as a control (FIG. 6C). The presence of both the C-terminal half of segment A and the central part of segment B gave the strongest signals (FIG. 6B; Hybrids 7, 11, and 13; lanes 3, 7, and 9, respectively).

[0500] To further identify amino acid residues of the canine IL4R epitopes recognized by Clone I, multiple mutant canine IL4 ECD sequences carrying alanine mutations based on SEQ ID NO: 99 were designed with a leader sequence (SEQ ID NO: 132) and a C-terminal human Fc-His6 tag and expressed in 293 cells. The cell supernatants were concentrated 3-fold, separated by SDS-PAGE under non-reducing (−DTT) conditions, and transferred to a PVDF membrane. The blot was probed using Clone I antibody (FIG. 7B) or anti-human Fc antibody as a control (FIG. 7C). The results of the fine epitope mapping are summarized in Table 7, below. The results suggest that amino acids M44 and G45 of canine IL4R ECD (SEQ ID NO: 95) are involved in epitope binding.

TABLE 7

| Mutant | FIG. 7 | SEQ | Canine IL4R ECD | Was a decreased |
|---|---|---|---|---|
| IL4R | Lane | ID NO: | Substitution | signal observed? |
| Mutant 1 | 3 | 147 | A33T | No |
| Mutant 2 | 4 | 148 | M44A | Yes |
| Mutant 3 | 5 | 149 | G45A | Yes |
| Mutant 4 | 6 | 150 | N48A | No |
| Mutant 5 | 7 | 151 | S38A | No |
| Mutant 6 | 8 | 152 | D42A | No |
| Mutant 7 | 9 | 153 | H49A | No |

[0501] A three-dimensional model of a complex of canine IL4 (SEQ ID NO: 121), canine IL4R ECD (SEQ ID NO: 99) and canine IL13R ECD (SEQ ID NO: 161) was constructed (FIG. 8). Canine IL4R epitope 1 is identified in FIG. 8. Analysis of the study results described above, and three-dimensional protein modeling analysis suggests that Clones B and I bind to a first epitope residing within L41 and T50 of canine IL4R ECD (SEQ ID NO: 99) or feline IL4R ECD (SEQ ID NO: 100), such as within R36 and N55. For example, the first epitope may comprise the amino acid sequence of SEQ ID NO: 88, SEQ ID NO: 89, SEQ ID NO: 91, or SEQ ID NO: 92. In some embodiments, the first epitope comprises the amino acid sequence LX₁₀FMGSENX₁₁T, wherein X₁₀ is D or N and x₁₁ is H or R (SEQ ID NO: 85). In some embodiments, the first epitope comprises the amino acid sequence RLSYQLX₁₀FMGSENX₁₁TCVPEN, wherein X₁₀ is D or N and x₁₁ is H or R (SEQ ID NO: 86).

[0502] Analysis of the study results and three-dimensional protein modeling also suggests that Clones B and I bind to a second epitope within amino acids S64 and Q85 of canine IL4R ECD (SEQ ID NO: 99) or feline IL4R ECD (SEQ ID NO: 100). For example, the second epitope may comprise the amino acid sequence of SEQ ID NO: 90 or SEQ ID NO: 93. In some embodiments, the second epitope comprises the amino acid sequence SMX₁₂X₁₃DDX₁₄VEADVYQLX₁₅LWAGXQ, wherein X₁₂ is P or L, X₁₃ is I or M, X₁₄ is A or F, X₁₅ is D or H, and X₁₆ is Q or T (SEQ ID NO: 87).

### Example 12

### Expression and Purification of Chimeric, Caninized, and Felinized Antibodies

[0503] Clone B or I variable heavy chain polypeptides may be fused to the heavy chain constant region of a different animal species, such as a wild-type canine IgG-A, IgG-B, IgG-C, or IgG-D or a wild-type feline IgG-1a, IgG-1b, or IgG-2 Fc polypeptide (e.g., IgG Fc polypeptides comprising SEQ ID NO: 162, 163, 164, 165, 166, 167, 203, 204, 205, 206, 207, 227, 228, 229, 230, 237, 238, 239, or 240), or variants of such IgG Fc polypeptides (e.g., variant IgG Fc polypeptides comprising SEQ ID NO: 168, 169, 170, 171, 172, 173, 174, 175, 176, 177, 178, 179, 180, 181, 182, 183, 184, 185, 186, 187, 188, 189, 190, 191, 192, 193, 194, 195, 196, 197, 198, 199, 200, 201, 202, 208, 209, 210, 211, 212, 213, 214, 215, 216, 217, 218, 219, 220, 221, 222, 223, 224, 225, 226, 231, 232, 233, 234, 239, or 240). Exemplary amino acid sequences of chimeric heavy chains include SEQ ID NO: 51 (Clone B variable HC and canine IgG-B) and SEQ ID NO: 55 (Clone I variable HC and canine IgG-B). In addition, Clone B or I variable light chain polypeptides may be fused to the light chain constant region of a companion animal species, such as a wild-type canine or feline light chain constant region (e.g., SEQ ID NO: 235 or 241), or variants of such polypeptides (e.g., SEQ ID NO: 236 or 242). Exemplary amino acid sequences of chimeric light chains include SEQ ID NO: 52 (Clone B variable LC and canine κ light chain constant region) and SEQ ID NO: 56 (Clone I variable LC and canine κ light chain constant region).

[0504] Clone B and I variable heavy and variable light chains were caninized and felinized by searching and selecting proper canine and feline germline antibody amino acid sequences as a template for CDR grafting. The sequences were further optimized using 3-dimensional structural modeling. Examples of caninized and felinized variants of Clone B and I variable heavy and variable light chain polypeptides that were designed include SEQ ID NO 59, SEQ ID NO: 60, SEQ ID NO: 61, SEQ ID NO: 62, SEQ ID NO: 63, SEQ ID NO: 64, SEQ ID NO: 274, SEQ ID NO: 65, SEQ ID NO: 66, SEQ ID NO: 275, SEQ ID NO: 67, SEQ ID NO: 68, SEQ ID NO: 69, and SEQ ID NO: 70.

[0505] Caninized or felinized heavy chain polypeptides may be fused to the heavy chain constant region of a wild-type canine IgG-A, IgG-B, IgG-C, or IgG-D or a wild-type feline IgG-1a, IgG-1b, or IgG-2 Fc polypeptide (e.g., IgG Fc polypeptides comprising SEQ ID NO: 162, 163, 164, 165, 166, 167, 203, 204, 205, 206, 207, 227, 228, 229, 230, 237, 238, 239, or 240), or variants of such IgG Fc polypeptides (e.g., variant IgG Fc polypeptides comprising SEQ ID NO: 168, 169, 170, 171, 172, 173, 174, 175, 176, 177, 178, 179, 180, 181, 182, 183, 184, 185, 186, 187, 188, 189, 190, 191, 192, 193, 194, 195, 196, 197, 198, 199, 200, 201, 202, 208, 209, 210, 211, 212, 213, 214, 215, 216, 217, 218, 219, 220, 221, 222, 223, 224, 225, 226, 231, 232, 233, 234, 239, or 240). Exemplary amino acid sequences of a caninized or felinized variable heavy chain and a variant IgG Fc polypeptide include SEQ ID NOs: 71, 72, 75, 76, 79, 80, 82, and 83.

[0506] Caninized or felinized light chain polypeptides may be fused to the light chain constant region of a companion animal species, such as a wild-type canine or feline light chain constant region (e.g., SEQ ID NO: 235 or 241), or variants of such polypeptides (e.g., SEQ ID NO: 236 or 242). Exemplary amino acid sequences of a caninized or felinized variable light chain and a κ light chain constant region include SEQ ID NOs: 73, 74, 77, 78, 81, and 84.

[0507] Nucleotide sequences encoding chimeric polypeptides of Clone B and I variable heavy chain fused to canine or feline IgG and Clone B and I variable light chain fused to canine or feline constant light chain were synthesized and cloned into expression vectors suitable for transfection into a CHO host cell. Nucleotide sequences encoding caninized and felinized Clone I polypeptides were also synthesized and cloned into expression vectors. Each pair of HC and LC nucleotide sequences was transfected into a CHO host cell. The cells were cultured and Clone B, Clone I, Chimeric B, and Chimeric I antibodies were purified from the culture medium by Protein A column chromatography.

[0508] Vectors may also be used to perform pilot-scale transfection in CHO-S cells using the FreestyleMax™ transfection reagent (Life Technologies). The supernatant is harvested by clarifying the conditioned media. Antibodies may be purified with a single pass Protein A chromatography step and used for further investigation.

[0509] Purified antibody preparations may be admixed with one or more pharmaceutically acceptable excipients and sterilized by filtration to prepare a pharmaceutical composition of the invention. Exemplary antibody preparations or pharmaceutical compositions may be administered to a dog or cat with an IL4R-induced condition, such as atopic dermatitis, allergic dermatitis, pruritus, asthma, psoriasis, scleroderma, or eczema in a therapeutically effective amount.

### Example 13

### Variant Canine IgG Fc Polypeptides for Increased Protein a Binding and/or Decreased Complement Binding and/or Decreased CD16 Binding

[0510] Purification of antibodies using Protein A affinity is a well-developed process. However, among four subtypes of canine IgG, only IgG-B Fc (e.g., SEQ ID NO: 163 or SEQ ID NO: 164) has Protein A binding affinity. Canine IgG-A Fc (e.g., SEQ ID NO: 162), IgG-C Fc (e.g., SEQ ID NO: 165 or SEQ ID NO: 166), and IgG-D Fc (e.g., SEQ ID NO: 167) have weak or no measurable Protein A binding affinity. Variant canine IgG-A Fc, IgG-C Fc, and IgG-D Fc polypeptides were designed for altered Protein A binding.

[0511] In addition, canine IgG-B Fc and IgG-C Fc have complement activity and bind to C1q, while canine IgG-A Fc and IgG-D Fc have weak or no measurable binding affinity to C1q. To potentially reduce the C1q binding and/or potentially reduce complement-mediated immune responses, variant canine IgG-B Fc and IgG-C Fc polypeptides were designed.

[0512] Furthermore, canine IgG-B Fc and IgG-C Fc have CD16 binding activity. To potentially reduce the binding of CD16 to IgG-B Fc and IgG-C Fc, and/or potentially reduce ADCC, variant canine IgG-B Fc and IgG-C Fc polypeptides were designed.

[0513] Table 8, below summarizes the Protein A and C1q binding characteristics of canine IgG Fc subtypes. Notably, none of the wild-type canine IgG Fc subtypes lacks C1q binding and binds Protein A.

TABLE 8

| Wild-type | Protein A | C1q | CD16 |
|---|---|---|---|
| Canine IgG Fc | Binding | Binding | Binding |
| IgG-A Fc | − | − | − |
| IgG-B Fc | + | + | + |
| IgG-C Fc | − | + | + |
| IgG-D Fc | − | − | − |

(−) denotes low or no measurabe binding activity.

[0514] Two approaches were used to design variant canine IgG-A, IgG-C, and IgG-D Fc polypeptides for increased Protein A binding. For the first approach, variant canine IgG-A, IgG-C, and IgG-D Fc polypeptides were designed to have the same Protein A binding motif sequences as canine IgG-B Fc (e.g., SEQ ID NO: 163, SEQ ID NO: 165, and SEQ ID NO: 167, respectively). For the second approach, variant canine IgG-A Fc I(21)T/Q(207)H (SEQ ID NO: 169), variant canine IgG-C Fc I(21)T (SEQ ID NO: 181), and variant canine IgG-D Fc I(21)T/Q(207)H (SEQ ID NO: 194) were designed with one or two amino acid substitutions in the Protein A binding region to correspond with the canine IgG-B Fc sequence.

[0515] In addition, variant canine IgG-A Fc, IgG-C Fc, and IgG-D Fc polypeptides with increased Protein A binding may be prepared having one or more of the amino acid substitutions listed in Table 9.

TABLE 9
Variant Canine IgG Fc Amino Acid
Substitutions* (Protein A +)

| Canine IgG-A Fc | Canine IgG-C Fc | Canine IgG-D Fc |
|---|---|---|
| (SEQ ID NO: 162) | (SEQ ID NO: 165) | (SEQ ID NO: 167) |
| Ile (21) Thr | Ile (21) Thr | Ile (23) Thr |
| Arg (23) Leu | Val (23) Leu | Arg (23) Leu |
| Thr (25) Ala | Thr (24) Ile | Thr (25) Ala |
| Glu (80) Gly | | Glu (80) Gly |
| Thr (205) Ala | | Gln (207) His |
| Gln (207) His | | |

*The amino acid positions listed are relative to the SEQ ID NO. indicated.

[0516] To potentially reduce the binding of C1q to canine IgG-B Fc and IgG-C Fc, and/or potentially reduce complement-mediated immune responses, variant canine IgG-B Fc and IgG-C Fc polypeptides may be prepared having an amino acid substitution of Lys with any amino acid except Lys at an amino acid position corresponding to position 93 of SEQ ID NO: 163 or of SEQ ID NO: 165, respectively. These amino acid substitutions were identified after analysis of the protein sequence and 3-D structure modeling of canine IgG-B Fc and IgG-C Fc compared to canine IgG-A Fc and IgG-D Fc, which are understood to not exhibit complement activity. For example, variant canine IgG-B Fc K(93)R (SEQ ID NO: 170) and variant canine IgG-C Fc K(93)R (SEQ ID NO: 182) may be prepared. Reduced binding between human C1q and a fusion protein comprising variant canine IgG-B Fc K(93)R was observed when compared to a fusion protein comprising wild-type canine IgG-B Fc.

[0517] To potentially reduce the binding of CD16 to IgG-B Fc and IgG-C Fc, and/or potentially reduce ADCC, variant canine IgG-B Fc and IgG-C Fc polypeptides may be prepared having one or more of the amino acid substitutions listed in Table 10. The amino acid substitution(s) were identified after analysis of the protein sequence and 3-D structure modeling of canine IgG-B and IgG-C compared to IgG-A and IgG-D, which are understood to not exhibit ADCC activity.

TABLE 10

| Original residue position* | | |
|---|---|---|
| Canine IgG-B Fc | Canine IgG-C Fc | |
| (SEQ ID NO: 163) | (SEQ ID NO: 165) | Substitution(s) |
| Met (5) | Leu (5) | Any amino acid |
| | | except original |
| | | residue, such as Pro |
| Asp (38) | Asp (38) | Any amino acid |
| | | except original |
| | | residue, such as |
| | | Gly |
| Pro (39) | Pro (39) | Any amino acid |
| | | except original |
| | | residue, such as |
| | | Arg |
| Lys (97) | Lys (97) | Any amino acid |
| | | except original |
| | | residue, such as Ile |
| Ala (98) | Ala (98) | Any amino acid |
| | | except original |
| | | residue, such as |
| | | Gly |

*The amino acid positions listed are relative to the SEQ ID NO. indicated.

[0518] Since wild-type canine IgG-C Fc lacks Protein A binding and has C1q binding, a double variant canine IgG-C Fc that binds Protein A and has reduced binding to C1q may be prepared by combining one or more of the amino acid substitutions listed in Table 9 with a K(93)R substitution or K(93)X substitution, wherein X is any amino acid except Lys. A double variant canine IgG-B Fc or double variant canine IgG-C Fc with reduced binding to C1q and reduced binding to CD16 may be prepared by combining one or more of the amino acid substitutions listed in Table 10 with a K(93)R substitution or K(93)X substitution, wherein X is any amino acid except Lys. A triple variant canine-IgG-C Fc that binds Protein A and has reduced binding to C1q and CD16 may be prepared by combining one or more of the amino acid substitutions listed in Table 9 and one or more of the amino acid substitutions listed in Table 10 with a K(93)R substitution or K(93)X substitution, wherein X is any amino acid except Lys.

[0519] The binding of any variant canine IgG Fc to Protein A, CD16, and/or C1q may be determined and compared to the binding of another IgG Fc to Protein A, CD16, and/or C1q (e.g., the corresponding wild-type canine IgG Fc, another wild-type or variant canine IgG Fc, or a wild-type or variant IgG Fc of another companion animal, etc.).

[0520] Binding analysis may be performed using an Octet biosensor. Briefly, the target molecule (e.g., Protein A, C1q, CD16, etc.) may be biotinylated and free unreacted biotin removed (e.g., by dialysis). The biotinylated target molecule is captured on streptavidin sensor tips. Association of the target molecule with various concentrations (e.g., 10 μg/mL) of IgG Fc polypeptide is monitored for a specified time or until steady state is reached. Dissociation is monitored for a specified time or until steady state is reached. A buffer only blank curve may be subtracted to correct for any drift. The data are fit to a 1:1 binding model using ForteBio™ data analysis software to determine the kₒₙ, k_{off}, and the K_{d}.

[0521] Exemplary variant canine IgG polypeptides for increased Protein A binding (e.g., for ease of purification), decreased C1q binding (e.g., for reduced complement-mediated immune responses), reduced CD16 binding (e.g., reduced antibody-dependent cell-mediated cytotoxicity), and/or increased stability include SEQ ID NOs: 169, 170, 171, 172, 173, 174, 175, 176, 177, 178, 179, 180, 181, 182, 183, 184, 185, 186, 187, 188, 189, 190, 191, 192, 193, and 194. Such variant canine IgG polypeptides may be incorporated with Clone B or I variable heavy chain sequences, caninized Clone B or I variable heavy chain sequences, or CDR sequences described in the above examples.

### Example 14

### Variant Feline IgG Fc Polypeptides for Decreased Complement Binding and/or Enhanced Hinge Disulfide Formation and/or Enhanced Recombinant Production

[0522] Each of the three subtypes of feline IgG, IgG1a Fc (SEQ ID NO: 203 or SEQ ID NO: 204), IgG1b Fc (SEQ ID NO: 205 or SEQ ID NO: 206), and IgG2 Fc (SEQ ID NO: 207) have Protein A binding affinity. However, only feline IgG2 Fc has weak or no measurable binding affinity to C1q, while feline IgG1a Fc, IgG1b Fc bind to C1q. To potentially reduce the C1q binding and/or potentially reduce complement-mediated immune responses, variant feline IgG1a Fc and IgG1b Fc polypeptides were designed.

[0523] Table 11, below summarizes the Protein A and C1q binding characteristics of feline IgG Fc subtypes. Notably, none of the wild-type equine IgG Fc subtypes lacks C1q binding and binds Protein A.

TABLE 11

| Wild-type | Protein A | C1q |
|---|---|---|
| Feline IgG Fc | Binding | Binding |
| IgG1a Fc | + | + |
| IgG1b Fc | + | + |
| IgG2 Fc | + | − |

(−) denotes low or no measurabe binding activity.

[0524] To potentially reduce the binding of C1q to feline IgG1a Fc and IgG1b Fc, and/or potentially reduce complement-mediated immune responses, variant feline IgG1a Fc and IgG1b Fc polypeptides may be prepared having an amino acid substitution of Pro with any amino acid except Pro at an amino acid position corresponding to position 198 of SEQ ID NO: 203, SEQ ID NO: 204, SEQ ID NO: 205, or SEQ ID NO: 206. These amino acid substitutions were identified after analysis of the protein sequence and 3-D structure modeling of feline IgG1a Fc and IgG1b Fc compared to feline IgG2 Fc, which is understood to not exhibit complement activity. For example, variant feline IgG1 Fc polypeptides P(198)A (SEQ ID NOs: 209, 210, 212, and 213) may be prepared.

[0525] The binding of any variant feline IgG Fc to C1q may be determined and compared to the binding of another IgG Fc to C1q (e.g., the corresponding wild-type feline IgG Fc, another wild-type or variant feline IgG Fc, or a wild-type or variant IgG Fc of another companion animal, etc.). The binding assay described in Example 13 may be used.

[0526] Three-dimensional protein modeling analysis of several ortholog hinge structures was used to modify feline IgG hinges to enhance disulfide formation. To enhance disulfide formation at the feline IgG hinge, the hinge sequence may be modified by substituting lysine with proline at a position corresponding to position 16 of feline IgG1a (SEQ ID NO: 203 or SEQ ID NO: 204) (e.g., K16P), feline IgG1b (SEQ ID NO: 205 or SEQ ID NO: 206), or feline IgG2 (SEQ ID NO: 207) (e.g., K(16)P). Examples of amino acid sequences of variant feline IgG polypeptides having a modified hinge include SEQ ID NO: 208, SEQ ID NO: 211, and SEQ ID NO: 215.

[0527] To increase disulfide formation at the feline IgG2 hinge, the hinge sequence may be modified by substituting an amino acid with cysteine. For example, a variant feline IgG2 Fc (SEQ ID NO: 214) having a modified hinge was prepared by substituting Gly with Cys at an amino acid position corresponding to position 14 of SEQ ID NO: 207.

[0528] Three-dimensional protein modeling was used to design feline variant IgG Fc polypeptides comprising sequences from the hinge region from a different IgG isotype for enhanced recombinant production and improved hinge disulfide formation. Variant feline IgG2 Fc polypeptides may be prepared that comprise sequences from the hinge region of feline IgG1a or IgG1b (e.g., SEQ ID NO: 216). Levels of recombinant production of variant IgG Fc polypeptides and/or levels of hinge disulfide formation may be determined and compared to that of another IgG Fc by SDS-PAGE analysis under reducing and non-reducing conditions (e.g., the corresponding wild-type IgG Fc of the same or different isotype, or a wild-type or variant IgG Fc of another companion animal, etc.).

[0529] Exemplary variant feline IgG polypeptides for decreased C1q binding (e.g., for reduced complement-mediated immune responses) and/or enhanced hinge disulfide formation and/or enhanced recombinant production include SEQ ID NOs: 208, 209, 210, 211, 212, 213, 214, 215, and 216. Such variant feline IgG polypeptides may be incorporated with Clone B or I variable heavy chain sequences, felinized Clone B or I variable heavy chain sequences, or CDR sequences described in the above examples.

### Example 15

### Variant Canine, Feline, and Equine IgG Fc Polypeptides for Bispecific Antibodies

[0530] To enable the preparation of a bispecific canine, feline, or equine antibody using a knob-in-hole heterodimerization approach, pairing of variant canine IgG Fc polypeptides, variant feline IgG Fc polypeptides, and variant equine IgG Fc polypeptides was investigated. Bispecific antibodies combine specifities of two antibodies against two different targets. First, heavy chain pairing was designed by introducing CH3 interfacing mutations so that one chain comprises a bulky amino acid (knob) and the other chain comprises smaller amino acids in the same general location (hole). Furthermore, to facilitate a heavy chain to specifically pair with its intended light chain, interface amino acids between CH1 and the light chain may be mutated to be complementary in shape and charge-charge interaction.

[0531] An amino acid substitution of tryptophan to tyrosine at a position corresponding to position 138 of canine IgG-A (SEQ ID NO: 162), at a position corresponding to position 137 of canine IgG-B Fc (SEQ ID NO: 163), at a position corresponding to position 137 of canine IgG-C Fc (SEQ ID NO: 165), or at a position corresponding to position 138 of canine IgG-D Fc (SEQ ID NO: 167) (T138W or T137W) can be introduced as a knob. Examples of amino acid sequences of a first variant canine IgG-A Fc, IgG-B Fc, IgG-C Fc, and IgG-D Fc are SEQ ID NO: 195, SEQ ID NO: 196, SEQ ID NO: 197, and SEQ ID NO: 198, respectively.

[0532] An amino acid substitution of threonine to serine at a position corresponding to position 138 and of leucine to alanine at a position corresponding to position 140 of canine IgG-A (SEQ ID NO: 162) or of IgG-D (SEQ ID NO: 167) (T138S, L140A), or of threonine to serine at a position corresponding to position 137 and of leucine to alanine at a position corresponding to position 139 of canine IgG-B Fc (SEQ ID NO: 163) or of IgG-C(SEQ ID NO: 165) (T137S, L139A) can be introduced as a hole. Examples of amino acid sequences of a second variant canine IgG-A Fc, IgG-B Fc, IgG-C Fc, and IgG-D Fc are SEQ ID NO: 199, SEQ ID NO: 200, SEQ ID NO: 201, and SEQ ID NO: 202.

[0533] An amino acid substitution of alanine to leucine at a position corresponding to position 24 and of serine to asparagine at a position corresponding to position 30 of a canine IgG-A CH1 (SEQ ID NO: 227), canine IgG-B CH1 (SEQ ID NO: 228), canine IgG-C CH1 (SEQ ID NO: 229), or canine IgG-D CH1 (SEQ ID NO: 230) (A24L, S30D) may be introduced. Examples of amino acid sequences of a variant canine IgG-A CH1, IgG-B CH1, IgG-C CH1, and IgG-D CH1 are SEQ ID NO: 231, SEQ ID NO: 232, SEQ ID NO: 233, and SEQ ID NO: 234.

[0534] An amino acid substitution of a phenylalanine to alanine at a position corresponding to position 11 and of serine to arginine at a position corresponding to position 22 of a canine κ constant region (SEQ ID NO: 235) (F11A, S22R) may be introduced. An example of an amino acid sequence of a variant canine κ constant region is SEQ ID NO: 236.

[0535] An amino acid substitution of threonine to tryptophan at a position corresponding to position 154 of feline IgG1a Fc (SEQ ID NO: 203 or SEQ ID NO: 204), feline IgG1b Fc (SEQ ID NO: 205 or SEQ ID NO: 206), or of feline IgG2 (SEQ ID NO: 207) (T154W) can be introduced as a knob. Examples of amino acid sequences of a first variant feline IgG2 Fc, IgG1a Fc, and IgG1b Fc are SEQ ID NO: 217, SEQ ID NO: 218, SEQ ID NO: 219, SEQ ID NO: 220, and SEQ ID NO: 221.

[0536] An amino acid substitution of threonine to serine at a position corresponding to position 154 and of leucine to alanine at a position corresponding to position 156 of feline IgG1a (SEQ ID NO: 203 or SEQ ID NO: 204), feline IgG-b Fc (SEQ ID NO: 205 or SEQ ID NO: 206), or feline IgG2 Fc (SEQ ID NO: 207) (T154S, L156A) can be introduced as a hole. Examples of amino acid sequences of a second variant feline IgG2 Fc, IgG1a Fc, and IgG1b Fc are SEQ ID NO: 222, SEQ ID NO: 223, SEQ ID NO: 224, SEQ ID NO: 225, and SEQ ID NO: 226.

[0537] An amino acid substitution of alanine to leucine at a position corresponding to position 24 and of serine to asparagine at a position corresponding to position 30 of feline IgG1 CH1 (SEQ ID NO: 237), or an amino acid substitution of alanine to leucine at a position corresponding to position 24 and of serine to asparagine at a position corresponding to position 29 of feline IgG2 CH1 (SEQ ID NO: 238) may be introduced. Examples of amino acid sequences of a variant feline IgG1 CH1 and IgG2 CH1 are SEQ ID NO: 239 and SEQ ID NO: 240.

[0538] An amino acid substitution of a phenylalanine to alanine at a position corresponding to position 11 and of serine to arginine at a position corresponding to position 22 of a feline κ constant region (SEQ ID NO: 241) (F11A, S22R) may be introduced. An example of an amino acid sequence of a variant feline κ constant region is SEQ ID NO: 242.

[0539] An amino acid substitution of threonine to tryptophan at a position corresponding to position 130 of equine IgG1 Fc (SEQ ID NO: 247), of equine IgG2 Fc (SEQ ID NO: 248), of equine IgG3 Fc (SEQ ID NO: 249), of equine IgG4 Fc (SEQ ID NO: 250), of equine IgG5 Fc (SEQ ID NO: 251), of equine IgG6 Fc (SEQ ID NO: 252), or of equine IgG7 Fc (SEQ ID NO: 253) (T130W) can be introduced as a knob. Examples of amino acid sequences of a first variant equine IgG1 Fc, IgG2 Fc, IgG3 Fc, IgG4 Fc, IgG5 Fc, IgG6 Fc, and IgG7 Fc are SEQ ID NO: 254, SEQ ID NO: 255, SEQ ID NO: 256, SEQ ID NO: 257, SEQ ID NO: 258, SEQ ID NO: 259, and SEQ ID NO: 260, respectively.

[0540] An amino acid substitution of threonine to serine at a position corresponding to position 130 and of leucine to alanine at a position corresponding to position 132 of equine IgG1 Fc (SEQ ID NO: 247), of equine IgG2 Fc (SEQ ID NO: 248), of equine IgG3 Fc (SEQ ID NO: 249), of equine IgG4 Fc (SEQ ID NO: 250), of equine IgG5 Fc (SEQ ID NO: 251), of equine IgG6 Fc (SEQ ID NO: 252), or of equine IgG7 Fc (SEQ ID NO: 253) (T130W) can be introduced as a hole. Examples of amino acid sequences of a second variant equine IgG1 Fc, IgG2 Fc, IgG3 Fc, IgG4 Fc, IgG5 Fc, IgG6 Fc, and IgG7 Fc are SEQ ID NO: 261, SEQ ID NO: 262, SEQ ID NO: 263, SEQ ID NO: 264, SEQ ID NO: 265, SEQ ID NO: 266, and SEQ ID NO: 267, respectively.

[0541] The above described approach may be used to prepare bispecific antibodies against IL4R and other targets, such as IL17, IL31, TNFα, CD20, CD19, CD25, IL4, IL13, IL23, IgE, CD11α, IL6R, α4-Intergrin, IL12, IL1β, or BlyS. For example, a bispecific antibody against canine IL4R and canine IL31 may be prepared with the amino acid sequences of SEQ ID NO: 243 (caninized Clone I variable HC v2 and variant IgG-B Fc C1q-, CD16- with bispecific knob), SEQ ID NO: 244 (caninized Clone I variable LC v2 and variable canine κ constant region), SEQ ID NO: 245 (caninized anti-canine IL31 Clone M14 variable HC and variant canine IgG-B Fc C1q-, CD16- with bispecific hole), and SEQ ID NO: 246 (caninized anti-canine IL31 Clone M14 variable LC and canine κ constant region).

### Example 16

### Identification of Additional Mouse Monoclonal Antibodies that Bind to Canine IL4R

[0542] Mouse monoclonal antibodies were identified using standard immunization using canine IL4R extracellular domains produced by 293 cells as the immunogen. Different adjuvants were used during immunizations (Antibody Solutions, Sunnyvale, Calif.) and monoclonal antibodies were obtained through standard hybridoma technology. Enzyme linked immunosorbent assay (ELISA) was developed to screen the clones that produce canine IL4R binding antibodies. First canine IL4R was biotinylated and then it was introduced to streptavidin-coated wells. Immunized serum was then added to the wells followed by washing and detection with HRP-conjugated anti-mouse antibodies. The presence of canine IL4R binding antibodies developed a positive signal. Over 100 ELISA-positive clones with high binding signals were identified.

[0543] Furthermore, a neutralization (canine IL4-blocking) ELISA was performed. Four clones were identified that their binding to canine IL4R can be inhibited by canine IL4. Binding of canine IL4 to canine IL4R was inhibited by four clones: M3, M5, M8 and M9.

[0544] The four mouse antibodies were purified from the hybridoma cell cultures and their affinities to canine IL4R were measured using biosensor (ForteBio OctetRed). Biotinylated canine IL4R was bound to the streptavidin sensor tip. The Kds of the 4 candidates were all less than 10 nM.

### Example 17

### Identification of VH and VL Sequences of M3, M5, M8, and M9

[0545] Hybridoma cells producing M3, M5, M8 and M9 were pelleted. RNA was extracted and oligonucleotide primers for amplifying mouse immunoglobulin (Ig) variable domains were used to obtain cDNA using standard techniques. The variable heavy chain (VH) and variable light chain (VL) of each of the four clones were determined (SEQ ID NO: 292 (M3 VH), SEQ ID NO: 293 (M3 VL), SEQ ID NO: 308 (M5 VH), SEQ ID NO: 309 (M5 VL), SEQ ID NO: 324 (M8 VH), SEQ ID NO: 325 (M8 VL), SEQ ID NO: 340 (M9 VH), SEQ ID NO: 341 (M9 VL).

### Example 18

### Expression and Purification of Murine-Canine Chimeric Antibodies from CHO Cells

[0546] DNA sequences encoding a chimeric antibody were designed for a fusion of murine VH and murine VL to canine constant heavy chain IgG-B and canine constant light chain (kappa). The nucleotide sequences were synthesized chemically and inserted into an expression vector suitable for transfection into a CHO host cell. After transfection into CHO cells, the light chain or heavy chain protein or both were secreted from the cell. All four chimeric canine IgG-B were purified by single step Protein A column chromatography. Their affinities to canine IL4R were confirmed to be <10 nM using biosensor (ForteBio OctetRed).

### Example 19

### Caninization and Expression from CHO Cells

[0547] Murine (M3, M9) VH and VL were caninized by searching and selecting proper canine germline antibody sequences as a template for CDR grafting, followed by protein modeling. Caninized variable light chain M3 (SEQ ID NO: 344) and caninized variable light chain M9 (SEQ ID NO: 347) were fused to canine CL kappa (resulting in SEQ ID NOs: 350 and 353, respectively). Caninized variable heavy chains of M3 (SEQ ID NO: 342 and SEQ ID NO: 343) and caninized variable heavy chains of M9 (SEQ ID NO: 344 and SEQ ID NO: 345) were fused to variant canine IgG-B resulting in SEQ ID NOs 348, SEQ ID NO: 349, SEQ ID NO: 351, and SEQ ID NO: 352, respectively). The heavy and light chains were readily expressed and purified in a single step with a protein A column.

[0548] The caninized antibodies expressed well and maintained binding affinity to canine IL4R of ≤1 nM.

### Example 20

### Development of Canine IL4R Cell-Based Signaling Assay

[0549] Canine DH82 cells, a canine macrophage-like cell line derived from Malignant histiocytosis was purchased from ATCC (CRL10389), were seeded at 10e5 cells/well in 96-well plates and incubated at 37° C., 5% CO₂ overnight (in 15% FBS D-MEM as recommended by ATCC). Serum starvation and antibody pre-incubation of cells were done by replacing medium in each well with serial diluted anti-IL4R or hybridoma supernatant preparations in D-MEM without FBS for 1 hour at 5% CO₂, 37° C. Then, canine IL4 cytokine (RnD AF754) was added at 1 ng/mL (final concentration) to each well for 15 min. at 5% CO₂, 37° C. Twenty microliters of stop solution (M-per Thermo Fisher #78501) was added each well. The IL4-inducible STAT6 phosphorylation in each well was assayed by anti-phospho-STAT6 (RnD MAB3717) western blotting.

[0550] M3, M8 and M9 mouse antibodies inhibited STAT6 phosphorylation as assessed by anti-phospho STAT6 Western blot.

### Example 21

### Identification of M3, M8 and M9 Canine IL4R Binding Epitopes

[0551] Since M3, M8 and M9 did not recognize human IL4R based on Western blot, yet strongly react to canine IL4R, combinations chimeric canine—human IL4R fusion molecules were made and expressed to identify the minimal canine segment(s) to which each antibody binds.

[0552] FIG. 9A illustrates the canine/human IL4R ECD hybrid polypeptides used for canine IL4R epitope mapping analyses (the same hybrid constructs used in the epitope mapping of Example 11, above). FIG. 9B summarizes the western blotting analysis in which canine IL4R ECD, human IL4R ECD, and the different canine/human IL4R ECD hybrid polypeptides were probed with M3, M8, and M9 antibodies. NR in the table represents that the antibody was not reactive to the hybrid IL4R ECD in the respective western blot indicating that the canine IL4R sequences replaced by human IL4R sequences are important for antibody binding (epitopes).

[0553] M3 was determined to bind an epitope having the sequence DFMGSENHTCVPEN (SEQ ID NO: 354). M8 was determined to bind to a first epitope having the sequence GSVKVLHEPSCFSDYISTSVCQWKMDHPTNCSA (SEQ ID NO: 355) and a second epitope having the sequence REDSVCVCSMPI (SEQ ID NO: 356). M9 was determined to bind to an epitope having the sequence REDSVCVCSMPIDDAVEADV (SEQ ID NO: 357).

1. An isolated antibody that binds to canine IL4R or feline IL4R, wherein the antibody binds to an epitope comprising the amino acid sequence of LX₁₀FMGSENX₁₁T (SEQ ID NO: 85), wherein X₁₀ is D or N and Xii is H or R.

2. An isolated antibody that binds to canine IL4R or feline IL4R, wherein the antibody binds to an epitope comprising the amino acid sequence of RLSYQLX₁₀FMGSENX₁₁TCVPEN (SEQ ID NO: 86), wherein X₁₀ is D or N and X₁₁ is H or R.

3. The isolated antibody of claim 2, wherein the antibody binds to an epitope comprising the amino acid sequence of LX₁₀FMGSENX₁₁T (SEQ ID NO: 85), wherein X₁₀ is D or N and X₁₁ is H or R.

4. The isolated antibody of any one of the preceding claims, wherein the antibody binds to an epitope comprising the amino acid sequence of SEQ ID NO: 88 or SEQ ID NO: 91.

5. The isolated antibody of any one of the preceding claims, wherein the antibody binds to an epitope comprising the amino acid sequence of SEQ ID NO: 89 or SEQ ID NO: 92.

6. The isolated antibody of any one of the preceding claims, wherein the antibody binds to an epitope comprising the amino acid sequence of SMX₁₂X₁₃DDX₁₄VEADVYQLX₁₅LWAGX₁₆Q (SEQ ID NO: 87), wherein X₁₂ is P or L, X₁₃ is I or M, X₁₄ is A or F, X₁₅ is D or H, and X₁₆ is Q or T.

7. An isolated antibody that binds to canine IL4R or feline IL4R, wherein the antibody binds to an epitope comprising the amino acid sequence of SMX₁₂X₁₃DDX₁₄VEADVYQLX₁₅LWAGX₁₆Q (SEQ ID NO: 87), wherein X₁₂ is P or L, X₁₃ is I or M, X₁₄ is A or F, X₁₅ is D or H, and X₁₆ is Q or T.

8. The isolated antibody of any one of the preceding claims, wherein the antibody binds to an epitope comprising the amino acid sequence of SEQ ID NO: 90 or SEQ ID NO: 93.

9. The isolated antibody of any one of the preceding claims, wherein the antibody binds to canine IL4R or feline IL4R with a dissociation constant (Kd) of less than 5×10⁻⁶ M, less than 1×10⁻⁶ M, less than 5×10⁻⁷ M, less than 1×10⁻⁸ M, less than 5×10⁻⁸ M, less than 1×10⁻⁸ M, less than 5×10⁻⁹ M, less than 1×10⁻⁹ M, less than 5×10⁻¹⁰ M, less than 1×10⁻¹⁰ M, less than 5×10⁻¹¹ M, less than 1×10¹¹ M, less than 5×10¹² M, or less than 1×10¹² M, as measured by biolayer interferometry.

10. The antibody of any one of the preceding claims, wherein the antibody binds to canine IL4R or feline IL4R as determined by immunoblot analysis or biolayer interferometry.

11. The isolated antibody of any one of the preceding claims, wherein the antibody reduces binding of a canine and/or feline IL4 polypeptide and/or a canine and/or feline IL13 polypeptide to canine IL4R and/or feline IL4R, as measured by biolayer interferometry.

12. The isolated antibody of any one of the preceding claims, wherein the antibody competes with monoclonal Clone B or Clone I antibody in binding to canine IL4R or feline IL4R.

13. The isolated antibody of any one of the preceding claims, wherein the antibody is a monoclonal antibody.

14. The isolated antibody of any one of the preceding claims, wherein the antibody is a canine, a caninized, a feline, a felinized, or a chimeric antibody.

15. The isolated antibody of any one of the preceding claims, wherein the antibody is a chimeric antibody comprising one or more murine variable heavy chain framework regions or one or more murine variable light chain framework regions.

16. The isolated antibody of any one of the preceding claims, comprising a heavy chain comprising:
a) a CDR-H1 sequence having at least 85%, at least 90%, at least 95%, at least 98%, or 100% sequence identity to the amino acid sequence of GYTFTSYVMH (SEQ ID NO: 1);
b) a CDR-H2 sequence having at least 85%, at least 90%, at least 95%, at least 98%, or 100% sequence identity to the amino acid sequence of YINPX₁NDGTFYNGX₂X₃X₄G (SEQ ID NO: 2), wherein X₁ is K or A, X2 K or A, X3 is F or V, and X4 is K or Q, or YINPX₁NDGT (SEQ ID NO: 268), wherein X₁ is K or A; and
c) a CDR-H3 sequence having at least 85%, at least 90%, at least 95%, at least 98%, or 100% sequence identity to the amino acid sequence of FX₅YGX₆AY (SEQ ID NO: 3), wherein X₅ is N or Y, and X₆ s I or F.

17. The isolated antibody of any one of the preceding claims, comprising a heavy chain comprising:
a) a CDR-H1 sequence having at least 85%, at least 90%, at least 95%, at least 98%, or 100% sequence identity to the amino acid sequence of SEQ ID NO: 1;
b) a CDR-H2 sequence having at least 85%, at least 90%, at least 95%, at least 98%, or 100% sequence identity to the amino acid sequence of SEQ ID NO: 8, SEQ ID NO: 269, SEQ ID NO: 30, SEQ ID NO: 271, or SEQ ID NO: 272; and
c) a CDR-H3 sequence having at least 85%, at least 90%, at least 95%, at least 98%, or 100% sequence identity to the amino acid sequence of SEQ ID NO: 9 or SEQ ID NO: 31.

18. The isolated antibody of any one of the preceding claims, comprising a heavy chain comprising:
a) a CDR-H1 comprising the amino acid sequence of SEQ ID NO: 1;
b) a CDR-H2 comprising the amino acid sequence of SEQ ID NO: 8, SEQ ID NO: 269, SEQ ID NO: 30, SEQ ID NO: 271, or SEQ ID NO: 272; and
c) a CDR-H3 comprising the amino acid sequence of SEQ ID NO: 9 or SEQ ID NO: 31.

19. The isolated antibody of any one of the preceding claims, comprising a light chain comprising:
a) a CDR-L1 sequence having at least 85%, at least 90%, at least 95%, at least 98%, or 100% sequence identity to the amino acid sequence of RASQEISGYLS (SEQ ID NO: 4);
b) a CDR-L2 sequence having at least 85%, at least 90%, at least 95%, at least 98%, or 100% sequence identity to the amino acid sequence of AASX₇X₈DX₉ (SEQ ID NO: 5), wherein X₇ is T or N, X₈ is R or L, and X₉ is S or T; and
c) a CDR-L3 sequence having at least 85%, at least 90%, at least 95%, at least 98%, or 100% sequence identity to the amino acid sequence of VQYASYPWT (SEQ ID NO: 6).

20. The isolated antibody of any one of the preceding claims, comprising a light chain comprising:
a) a CDR-L1 sequence having at least 85%, at least 90%, at least 95%, at least 98%, or 100% sequence identity to the amino acid sequence of SEQ ID NO: 4;
b) a CDR-L2 sequence having at least 85%, at least 90%, at least 95%, at least 98%, or 100% sequence identity to the amino acid sequence of SEQ ID NO: 15 or SEQ ID NO: 37; and
c) a CDR-L3 sequence having at least 85%, at least 90%, at least 95%, at least 98%, or 100% sequence identity to the amino acid sequence of SEQ ID NO: 6.

21. The isolated antibody of any one of the preceding claims, comprising a light chain comprising:
a) a CDR-L1 comprising the amino acid sequence of SEQ ID NO: 4;
b) a CDR-L2 comprising the amino acid sequence of SEQ ID NO: 15 or SEQ ID NO: 37; and
c) a CDR-L3 comprising the amino acid sequence of SEQ ID NO: 6.

22. The antibody of any one of claims 16 to 21, further comprising one or more of (a) a variable region heavy chain framework 1 (HC-FR1) sequence of SEQ ID NO: 10 or SEQ ID NO: 32; (b) a HC-FR2 sequence of SEQ ID NO: 11 or SEQ ID NO: 33; (c) a HC-FR3 sequence of SEQ ID NO: 12, SEQ ID NO: 270, SEQ ID NO: 34, SEQ ID ID NO: 273; (d) a HC-FR4 sequence of SEQ ID NO: 13 or SEQ ID NO: 35; (e) a variable region light chain framework 1 (LC-FR1) sequence of SEQ ID NO: 17 or SEQ ID NO: 39; (f) an LC-FR2 sequence of SEQ ID NO: 18 or SEQ ID NO: 40; (g) an LC-FR3 sequence of SEQ ID NO: 19 or SEQ ID NO: 41; or (h) an LC-FR4 sequence of SEQ ID NO: 20 or SEQ ID NO: 42.

23. The antibody of any one of the preceding claims, wherein the antibody comprises:
a. (i) a variable heavy chain sequence having at least 85%, at least 90%, at least 95%, at least 98%, or 100% sequence identity to the amino acid sequence of SEQ ID NO: 21 or SEQ ID NO: 43; (ii) a variable light chain sequence having at least 85%, at least 90%, at least 95%, at least 98%, or 100% sequence identity to the amino acid sequence of SEQ ID NO: 22 or SEQ ID NO: 44; or (iii) a variable heavy chain sequence as in (i) and a variable light chain sequence as in (ii); or
b. (i) a variable heavy chain sequence having at least 85%, at least 90%, at least 95%, at least 98%, or 100% sequence identity to the amino acid sequence of SEQ ID NO: 59, SEQ ID NO: 60, SEQ ID NO: 63, SEQ ID NO: 64, or SEQ ID NO: 274; (ii) a variable light chain sequence having at least 85%, at least 90%, at least 95%, at least 98%, or 100% sequence identity to the amino acid sequence of SEQ ID NO: 61, SEQ ID NO: 62, SEQ ID NO: 65, SEQ ID NO: 66, SEQ ID NO: 275; or (iii) a variable heavy chain sequence as in (i) and a variable light chain sequence as in (ii); or
c. (i) a variable heavy chain sequence having at least 85%, at least 90%, at least 95%, at least 98%, or 100% sequence identity to the amino acid sequence of SEQ ID NO: 67 or SEQ ID NO: 69; (ii) a variable light chain sequence having at least 85%, at least 90%, at least 95%, at least 98%, or 100% sequence identity to the amino acid sequence of SEQ ID NO: 68 or SEQ ID NO: 70; or (iii) a variable heavy chain sequence as in (i) and a variable light chain sequence as in (ii).

24. The antibody of any one of the preceding claims, wherein the antibody comprises a variable heavy chain sequence comprising the amino acid sequence of SEQ ID NO: 21, SEQ ID NO: 43, SEQ ID NO: 59, SEQ ID NO: 60, SEQ ID NO: 63, SEQ ID NO: 64, SEQ ID NO: 274, SEQ ID NO: 67, or SEQ ID NO: 69.

25. The antibody of any one of the preceding claims, wherein the antibody comprises a variable light chain sequence comprising the amino acid sequence of SEQ ID NO: 22, SEQ ID NO: 44, SEQ ID NO: 61, SEQ ID NO: 62, SEQ ID NO: 65, SEQ ID NO: 66, SEQ ID NO: 275, SEQ ID NO: 68, or SEQ ID NO: 70.

26. The antibody of any one of the preceding claims, wherein the antibody comprises:
a) a variable heavy chain sequence comprising the amino acid sequence of SEQ ID NO: 21 or SEQ ID NO: 43, and a variable light chain sequence comprising the amino acid sequence of SEQ ID NO: 22 or SEQ ID NO: 44;
b) a variable heavy chain sequence comprising the amino acid sequence of SEQ ID NO: 59, SEQ ID NO: 60, SEQ ID NO: 63, SEQ ID NO: 64, or SEQ ID NO: 274 and a variable light chain sequence comprising the amino acid sequence of SEQ ID NO: 61, SEQ ID NO: 62, SEQ ID NO: 65, SEQ ID NO: 66, or SEQ ID NO: 275; or
c) a variable heavy chain sequence comprising the amino acid sequence of SEQ ID NO: 67 or SEQ ID NO: 69 and a variable light chain sequence comprising the amino acid sequence of SEQ ID NO: 68 or SEQ ID NO: 70.

27. An isolated antibody that binds to canine IL4R or feline IL4R, wherein the antibody binds to an epitope comprising the amino acid sequence of SEQ ID NO: 354.

28. The isolated antibody of claim 27, wherein the antibody binds to canine IL4R or feline IL4R with a dissociation constant (Kd) of less than 5×10⁻⁶ M, less than 1×10⁻⁶ M, less than 5×10⁻⁷ M, less than 1×10⁻⁷ M, less than 5×10⁻⁸ M, less than 1×10⁻⁸ M, less than 5×10⁻⁹ M, less than 1×10⁻⁹ M, less than 5×10⁻¹⁰ M, less than 1×10⁻¹⁰ M, less than 5×10⁻¹¹ M, less than 1×10⁻¹¹ M, less than 5×10⁻¹² M, or less than 1×10⁻¹² M, as measured by biolayer interferometry.

29. The antibody of claim 27 or claim 28, wherein the antibody binds to canine IL4R or feline IL4R as determined by immunoblot analysis or biolayer interferometry.

30. The isolated antibody of any one of claims 27 to 29, wherein the antibody reduces binding of a canine and/or feline IL4 polypeptide and/or a canine and/or feline IL13 polypeptide to canine IL4R and/or feline IL4R, as measured by biolayer interferometry.

31. The isolated antibody of any one of claims 27 to 30, wherein the antibody competes with monoclonal M3 antibody in binding to canine IL4R or feline IL4R.

32. The isolated antibody of any one of claims 27 to 31, wherein the antibody is a monoclonal antibody.

33. The isolated antibody of any one of claims 27 to 32, wherein the antibody is a canine, a caninized, a feline, a felinized, or a chimeric antibody.

34. The isolated antibody of any one of claims 27 to 33, wherein the antibody is a chimeric antibody comprising one or more murine variable heavy chain framework regions or one or more murine variable light chain framework regions.

35. The isolated antibody of any one of claims 27 to 34, comprising a heavy chain comprising:
a) a CDR-H1 sequence having at least 85%, at least 90%, at least 95%, at least 98%, or 100% sequence identity to the amino acid sequence of SEQ ID NO: 278;
b) a CDR-H2 sequence having at least 85%, at least 90%, at least 95%, at least 98%, or 100% sequence identity to the amino acid sequence of SEQ ID NO: 279; and
c) a CDR-H3 sequence having at least 85%, at least 90%, at least 95%, at least 98%, or 100% sequence identity to the amino acid sequence of SEQ ID NO: 280.

36. The isolated antibody of any one of claims 27 to 35, comprising a light chain comprising:
a) a CDR-L1 sequence having at least 85%, at least 90%, at least 95%, at least 98%, or 100% sequence identity to the amino acid sequence of SEQ ID NO: 285;
b) a CDR-L2 sequence having at least 85%, at least 90%, at least 95%, at least 98%, or 100% sequence identity to the amino acid sequence of SEQ ID NO: 286; and
c) a CDR-L3 sequence having at least 85%, at least 90%, at least 95%, at least 98%, or 100% sequence identity to the amino acid sequence of SEQ ID NO: 287.

37. The isolated antibody of any one of claims 27 to 36, further comprising one or more of (a) a variable region heavy chain framework 1 (HC-FR1) sequence of SEQ ID NO: 281; (b) a HC-FR2 sequence of SEQ ID NO: 282; (c) a HC-FR3 sequence of SEQ ID NO: 283; (d) a HC-FR4 sequence of SEQ ID NO: 284; (e) a variable region light chain framework 1 (LC-FR1) sequence of SEQ ID NO: 288; (f) an LC-FR2 sequence of SEQ ID NO: 289; (g) an LC-FR3 sequence of SEQ ID NO: 290; or (h) an LC-FR4 sequence of SEQ ID NO: 291.

38. The isolated antibody of any one of claims 27 to 37, wherein the antibody comprises:
a. (i) a variable heavy chain sequence having at least 85%, at least 90%, at least 95%, at least 98%, or 100% sequence identity to the amino acid sequence of SEQ ID NO: 292; (ii) a variable light chain sequence having at least 85%, at least 90%, at least 95%, at least 98%, or 100% sequence identity to the amino acid sequence of SEQ ID NO: 293; or (iii) a variable heavy chain sequence as in (i) and a variable light chain sequence as in (ii); or
b. (i) a variable heavy chain sequence having at least 85%, at least 90%, at least 95%, at least 98%, or 100% sequence identity to the amino acid sequence of SEQ ID NO: 342 or SEQ ID NO: 343; (ii) a variable light chain sequence having at least 85%, at least 90%, at least 95%, at least 98%, or 100% sequence identity to the amino acid sequence of SEQ ID NO: 344; or (iii) a variable heavy chain sequence as in (i) and a variable light chain sequence as in (ii).

39. The isolated antibody of any one of claims 27 to 38, wherein the antibody comprises a variable heavy chain sequence comprising the amino acid sequence of SEQ ID NO: 292, SEQ ID NO: 342, or SEQ ID NO: 343.

40. The isolated antibody of any one of claims 27 to 39, wherein the antibody comprises a variable light chain sequence comprising the amino acid sequence of SEQ ID NO: 293 or SEQ ID NO: 344.

41. The isolated antibody of any one of claims 27 to 40, wherein the antibody comprises:
a) a variable heavy chain sequence comprising the amino acid sequence of SEQ ID NO: 292, and a variable light chain sequence comprising the amino acid sequence of SEQ ID NO: 293; and/or
b) a variable heavy chain sequence comprising the amino acid sequence of SEQ ID NO: 342 or SEQ ID NO: 343, and a variable light chain sequence comprising the amino acid sequence of SEQ ID NO: 344.

42. An isolated antibody comprising:
a) a variable heavy chain sequence comprising the amino acid sequence of SEQ ID NO: 292, and a variable light chain sequence comprising the amino acid sequence of SEQ ID NO: 293; or
b) a variable heavy chain sequence comprising the amino acid sequence of SEQ ID NO: 342 or SEQ ID NO: 343, and a variable light chain sequence comprising the amino acid sequence of SEQ ID NO: 344.

43. An isolated antibody that binds to canine IL4R or feline IL4R, wherein the antibody binds to an epitope comprising the amino acid sequence of SEQ ID NO: 355 and/or an epitope comprising the amino acid sequence of SEQ ID NO: 356.

44. The isolated antibody of claim 43, wherein the antibody binds to canine IL4R or feline IL4R with a dissociation constant (Kd) of less than 5×10⁻⁶ M, less than 1×10⁻⁶ M, less than 5×10⁻⁷ M, less than 1×10⁻⁷ M, less than 5×10⁻⁸ M, less than 1×10⁻⁸ M, less than 5×10⁻⁹ M, less than 1×10⁻⁹ M, less than 5×10⁻¹⁰ M, less than 1×10⁻¹⁰ M, less than 5×10⁻¹¹ M, less than 1×10⁻¹¹ M, less than 5×10⁻¹² M, or less than 1×10⁻¹² M, as measured by biolayer interferometry.

45. The antibody of claim 43 or claim 44, wherein the antibody binds to canine IL4R or feline IL4R as determined by immunoblot analysis or biolayer interferometry.

46. The isolated antibody of any one of claims 43 to 45, wherein the antibody reduces binding of a canine and/or feline IL4 polypeptide and/or a canine and/or feline IL13 polypeptide to canine IL4R and/or feline IL4R, as measured by biolayer interferometry.

47. The isolated antibody of any one of claims 43 to 46, wherein the antibody competes with monoclonal M8 antibody in binding to canine IL4R or feline IL4R.

48. The isolated antibody of any one of claims 43 to 47, wherein the antibody is a monoclonal antibody.

49. The isolated antibody of any one of claims 43 to 48, wherein the antibody is a canine, a caninized, a feline, a felinized, or a chimeric antibody.

50. The isolated antibody of any one of claims 43 to 49, wherein the antibody is a chimeric antibody comprising one or more murine variable heavy chain framework regions or one or more murine variable light chain framework regions.

51. The isolated antibody of any one of claims 43 to 50, comprising a heavy chain comprising:
a) a CDR-H1 sequence having at least 85%, at least 90%, at least 95%, at least 98%, or 100% sequence identity to the amino acid sequence of SEQ ID NO: 310;
b) a CDR-H2 sequence having at least 85%, at least 90%, at least 95%, at least 98%, or 100% sequence identity to the amino acid sequence of SEQ ID NO: 311; and
c) a CDR-H3 sequence having at least 85%, at least 90%, at least 95%, at least 98%, or 100% sequence identity to the amino acid sequence of SEQ ID NO: 312.

52. The isolated antibody of any one of claims 43 to 51, comprising a light chain comprising:
a) a CDR-L1 sequence having at least 85%, at least 90%, at least 95%, at least 98%, or 100% sequence identity to the amino acid sequence of SEQ ID NO: 317;
b) a CDR-L2 sequence having at least 85%, at least 90%, at least 95%, at least 98%, or 100% sequence identity to the amino acid sequence of SEQ ID NO: 318; and
c) a CDR-L3 sequence having at least 85%, at least 90%, at least 95%, at least 98%, or 100% sequence identity to the amino acid sequence of SEQ ID NO: 319.

53. The isolated antibody of any one of claims 43 to 52, further comprising one or more of (a) a variable region heavy chain framework 1 (HC-FR1) sequence of SEQ ID NO: 313; (b) a HC-FR2 sequence of SEQ ID NO: 314; (c) a HC-FR3 sequence of SEQ ID NO: 315; (d) a HC-FR4 sequence of SEQ ID NO: 316; (e) a variable region light chain framework 1 (LC-FR1) sequence of SEQ ID NO: 320; (f) an LC-FR2 sequence of SEQ ID NO: 321; (g) an LC-FR3 sequence of SEQ ID NO: 322; or (h) an LC-FR4 sequence of SEQ ID NO: 323.

54. The isolated antibody of any one of claims 43 to 53, wherein the antibody comprises:
(a) a variable heavy chain sequence having at least 85%, at least 90%, at least 95%, at least 98%, or 100% sequence identity to the amino acid sequence of SEQ ID NO: 324;
(b) a variable light chain sequence having at least 85%, at least 90%, at least 95%, at least 98%, or 100% sequence identity to the amino acid sequence of SEQ ID NO: 325; or
(c) a variable heavy chain sequence as in (a) and a variable light chain sequence as in (b).

55. The isolated antibody of any one of claims 43 to 54, wherein the antibody comprises a variable heavy chain sequence comprising the amino acid sequence of SEQ ID NO: 324.

56. The isolated antibody of any one of claims 43 to 55, wherein the antibody comprises a variable light chain sequence comprising the amino acid sequence of SEQ ID NO: 325.

57. The isolated antibody of any one of claims 43 to 56, wherein the antibody comprises: a variable heavy chain sequence comprising the amino acid sequence of SEQ ID NO: 324, and a variable light chain sequence comprising the amino acid sequence of SEQ ID NO: 325.

58. An isolated antibody comprising: a variable heavy chain sequence comprising the amino acid sequence of SEQ ID NO: 324, and a variable light chain sequence comprising the amino acid sequence of SEQ ID NO: 325.

59. An isolated antibody that binds to canine IL4R, wherein the antibody binds to an epitope comprising the amino acid sequence of SEQ ID NO: 357.

60. The isolated antibody of claim 59, wherein the antibody binds to canine IL4R with a dissociation constant (Kd) of less than 5×10⁻⁶ M, less than 1×10⁻⁶ M, less than 5×10⁻⁷ M, less than 1×10⁻⁷ M, less than 5×10⁻⁸ M, less than 1×10⁻⁸ M, less than 5×10⁻⁹ M, less than 1×10⁻⁹ M, less than 5×10⁻¹⁰ M, less than 1×10⁻¹⁰ M, less than 5×10⁻¹¹ M, less than 1×10⁻¹¹ M, less than 5×10⁻¹² M, or less than 1×10⁻¹² M, as measured by biolayer interferometry.

61. The antibody of claim 58 or claim 59, wherein the antibody binds to canine IL4R as determined by immunoblot analysis or biolayer interferometry.

62. The isolated antibody of any one of claims 58 to 61, wherein the antibody reduces binding of a canine IL4 polypeptide and/or a canine IL13 polypeptide to canine IL4R, as measured by biolayer interferometry.

63. The isolated antibody of any one of claims 58 to 62, wherein the antibody competes with monoclonal M9 antibody in binding to canine IL4R.

64. The isolated antibody of any one of claims 58 to 63, wherein the antibody is a monoclonal antibody.

65. The isolated antibody of any one of claims 58 to 64, wherein the antibody is a canine, a caninized, a feline, a felinized, or a chimeric antibody.

66. The isolated antibody of any one of claims 58 to 65, wherein the antibody is a chimeric antibody comprising one or more murine variable heavy chain framework regions or one or more murine variable light chain framework regions.

67. The isolated antibody of any one of claims 58 to 66, comprising a heavy chain comprising:
a) a CDR-H1 sequence having at least 85%, at least 90%, at least 95%, at least 98%, or 100% sequence identity to the amino acid sequence of SEQ ID NO: 326;
b) a CDR-H2 sequence having at least 85%, at least 90%, at least 95%, at least 98%, or 100% sequence identity to the amino acid sequence of SEQ ID NO: 327; and
c) a CDR-H3 sequence having at least 85%, at least 90%, at least 95%, at least 98%, or 100% sequence identity to the amino acid sequence of SEQ ID NO: 328.

68. The isolated antibody of any one of claims 58 to 67, comprising a light chain comprising:
a) a CDR-L1 sequence having at least 85%, at least 90%, at least 95%, at least 98%, or 100% sequence identity to the amino acid sequence of SEQ ID NO: 333;
b) a CDR-L2 sequence having at least 85%, at least 90%, at least 95%, at least 98%, or 100% sequence identity to the amino acid sequence of SEQ ID NO: 334; and
c) a CDR-L3 sequence having at least 85%, at least 90%, at least 95%, at least 98%, or 100% sequence identity to the amino acid sequence of SEQ ID NO: 335.

69. The isolated antibody of any one of claims 58 to 68, further comprising one or more of (a) a variable region heavy chain framework 1 (HC-FR1) sequence of SEQ ID NO: 329; (b) a HC-FR2 sequence of SEQ ID NO: 330; (c) a HC-FR3 sequence of SEQ ID NO: 331; (d) a HC-FR4 sequence of SEQ ID NO: 332; (e) a variable region light chain framework 1 (LC-FR1) sequence of SEQ ID NO: 336; (f) an LC-FR2 sequence of SEQ ID NO: 337; (g) an LC-FR3 sequence of SEQ ID NO: 338; or (h) an LC-FR4 sequence of SEQ ID NO: 339.

70. The isolated antibody of any one of claims 58 to 69, wherein the antibody comprises:
a. (i) a variable heavy chain sequence having at least 85%, at least 90%, at least 95%, at least 98%, or 100% sequence identity to the amino acid sequence of SEQ ID NO: 340; (ii) a variable light chain sequence having at least 85%, at least 90%, at least 95%, at least 98%, or 100% sequence identity to the amino acid sequence of SEQ ID NO: 341; or (iii) a variable heavy chain sequence as in (i) and a variable light chain sequence as in (ii); or
b. (i) a variable heavy chain sequence having at least 85%, at least 90%, at least 95%, at least 98%, or 100% sequence identity to the amino acid sequence of SEQ ID NO: 345 or SEQ ID NO: 346; (ii) a variable light chain sequence having at least 85%, at least 90%, at least 95%, at least 98%, or 100% sequence identity to the amino acid sequence of SEQ ID NO: 347; or (iii) a variable heavy chain sequence as in (i) and a variable light chain sequence as in (ii).

71. The isolated antibody of any one of claims 58 to 70, wherein the antibody comprises a variable heavy chain sequence comprising the amino acid sequence of SEQ ID NO: 340, SEQ ID NO: 345, or SEQ ID NO: 346.

72. The isolated antibody of any one of claims 58 to 71, wherein the antibody comprises a variable light chain sequence comprising the amino acid sequence of SEQ ID NO: 341 or SEQ ID NO: 347.

73. The isolated antibody of any one of claims 58 to 72, wherein the antibody comprises:
a) a variable heavy chain sequence comprising the amino acid sequence of SEQ ID NO: 340, and a variable light chain sequence comprising the amino acid sequence of SEQ ID NO: 341; and/or
b) a variable heavy chain sequence comprising the amino acid sequence of SEQ ID NO: 345 or SEQ ID NO: 346, and a variable light chain sequence comprising the amino acid sequence of SEQ ID NO: 347.

74. An isolated antibody comprising:
a) a variable heavy chain sequence comprising the amino acid sequence of SEQ ID NO: 340, and a variable light chain sequence comprising the amino acid sequence of SEQ ID NO: 341; or
b) a variable heavy chain sequence comprising the amino acid sequence of SEQ ID NO: 345, or SEQ ID NO: 346 and a variable light chain sequence comprising the amino acid sequence of SEQ ID NO: 347.

75. An isolated antibody that binds to canine IL4R, comprising a heavy chain comprising:
a) a CDR-H1 sequence having at least 85%, at least 90%, at least 95%, at least 98%, or 100% sequence identity to the amino acid sequence of SEQ ID NO: 294;
b) a CDR-H2 sequence having at least 85%, at least 90%, at least 95%, at least 98%, or 100% sequence identity to the amino acid sequence of SEQ ID NO: 295; and
c) a CDR-H3 sequence having at least 85%, at least 90%, at least 95%, at least 98%, or 100% sequence identity to the amino acid sequence of SEQ ID NO: 296.

76. An isolated antibody that binds to canine IL4R, comprising a light chain comprising:
a) a CDR-L1 sequence having at least 85%, at least 90%, at least 95%, at least 98%, or 100% sequence identity to the amino acid sequence of SEQ ID NO: 301;
b) a CDR-L2 sequence having at least 85%, at least 90%, at least 95%, at least 98%, or 100% sequence identity to the amino acid sequence of SEQ ID NO: 302; and
c) a CDR-L3 sequence having at least 85%, at least 90%, at least 95%, at least 98%, or 100% sequence identity to the amino acid sequence of SEQ ID NO: 303.

77. The isolated antibody of claim 75, comprising a light chain comprising:
a) a CDR-L1 sequence having at least 85%, at least 90%, at least 95%, at least 98%, or 100% sequence identity to the amino acid sequence of SEQ ID NO: 301;
b) a CDR-L2 sequence having at least 85%, at least 90%, at least 95%, at least 98%, or 100% sequence identity to the amino acid sequence of SEQ ID NO: 302; and
c) a CDR-L3 sequence having at least 85%, at least 90%, at least 95%, at least 98%, or 100% sequence identity to the amino acid sequence of SEQ ID NO: 303.

78. The isolated antibody of any one of claims 75 to 77, wherein the antibody binds to canine IL4R with a dissociation constant (Kd) of less than 5×10⁻⁶ M, less than 1×10⁻⁶ M, less than 5×10⁻⁷ M, less than 1×10⁻⁷ M, less than 5×10⁻⁸ M, less than 1×10⁻⁸ M, less than 5×10⁻⁹ M, less than 1×10⁻⁹ M, less than 5×10⁻¹⁰ M, less than 1×10⁻¹⁰ M, less than 5×10⁻¹¹ M, less than 1×10⁻¹¹ M, less than 5×10⁻¹² M, or less than 1×10⁻¹² M, as measured by biolayer interferometry.

79. The antibody of any one of claims 75 to 78, wherein the antibody binds to canine IL4R as determined by immunoblot analysis or biolayer interferometry.

80. The isolated antibody of any one of claims 75 to 79, wherein the antibody reduces binding of a canine IL4 polypeptide and/or a canine IL13 polypeptide to canine IL4R, as measured by biolayer interferometry.

81. The isolated antibody of any one of claims 75 to 80, wherein the antibody competes with monoclonal M5 antibody in binding to canine IL4R.

82. The isolated antibody of any one of claims 75 to 81, wherein the antibody is a monoclonal antibody.

83. The isolated antibody of any one of claims 75 to 82, wherein the antibody is a canine, a caninized, a feline, a felinized, or a chimeric antibody.

84. The isolated antibody of any one of claims 75 to 83, wherein the antibody is a chimeric antibody comprising one or more murine variable heavy chain framework regions or one or more murine variable light chain framework regions.

85. The isolated antibody of any one of claims 75 to 84, further comprising one or more of (a) a variable region heavy chain framework 1 (HC-FR1) sequence of SEQ ID NO: 297; (b) a HC-FR2 sequence of SEQ ID NO: 298; (c) a HC-FR3 sequence of SEQ ID NO: 299; (d) a HC-FR4 sequence of SEQ ID NO: 300; (e) a variable region light chain framework 1 (LC-FR1) sequence of SEQ ID NO: 304; (f) an LC-FR2 sequence of SEQ ID NO: 305; (g) an LC-FR3 sequence of SEQ ID NO: 306; or (h) an LC-FR4 sequence of SEQ ID NO: 307.

86. The isolated antibody of any one of claims 75 to 85, wherein the antibody comprises:
(a) a variable heavy chain sequence having at least 85%, at least 90%, at least 95%, at least 98%, or 100% sequence identity to the amino acid sequence of SEQ ID NO: 308;
(b) a variable light chain sequence having at least 85%, at least 90%, at least 95%, at least 98%, or 100% sequence identity to the amino acid sequence of SEQ ID NO: 309; or
(c) a variable heavy chain sequence as in (a) and a variable light chain sequence as in (b).

87. The isolated antibody of any one of claims 75 to 86, wherein the antibody comprises a variable heavy chain sequence comprising the amino acid sequence of SEQ ID NO: 308.

88. The isolated antibody of any one of claims 75 to 87, wherein the antibody comprises a variable light chain sequence comprising the amino acid sequence of SEQ ID NO: 309.

89. The isolated antibody of any one of claims 75 to 88, wherein the antibody comprises: a variable heavy chain sequence comprising the amino acid sequence of SEQ ID NO: 308, and a variable light chain sequence comprising the amino acid sequence of SEQ ID NO: 309.

90. An isolated antibody comprising: a variable heavy chain sequence comprising the amino acid sequence of SEQ ID NO: 308, and a variable light chain sequence comprising the amino acid sequence of SEQ ID NO: 309.

91. The antibody of any one of the preceding claims, wherein the antibody comprises a wild-type or a variant canine or feline IgG Fc polypeptide.

92. The antibody of claim 91, wherein the IgG Fc polypeptide is a wild-type or variant canine IgG-A Fc polypeptide; a wild-type or variant canine IgG-B Fc polypeptide; a wild-type or variant IgG-C Fc polypeptide; a wild-type or variant IgG-D Fc polypeptide; a wild-type or variant feline IgG1a Fc polypeptide; a wild-type or variant feline IgG1b Fc polypeptide; or a wild-type or variant feline IgG2 Fc polypeptide.

93. The antibody of claim 91 or claim 92, wherein the variant IgG Fc polypeptide comprises at least one amino acid modification relative to a wild-type IgG Fc polypeptide, wherein the variant IgG Fc polypeptide has increased binding affinity to Protein A relative to the wild-type IgG Fc polypeptide; reduced binding affinity to C1q relative to the wild-type IgG Fc polypeptide; and/or reduced binding affinity to CD16 relative to the wild-type IgG Fc polypeptide.

94. The antibody of any one of claims 91 to 93, wherein the variant IgG Fc polypeptide comprises at least one amino acid modification to a hinge region relative to a wild-type IgG Fc polypeptide, wherein the variant IgG Fc polypeptide has increased recombinant production and/or increased hinge disulfide formation relative to the wild-type IgG Fc polypeptide, as determined by SDS-PAGE analysis under reducing and/or nonreducing conditions.

95. The antibody of any one of claims 91 to 94, wherein the variant IgG Fc polypeptide comprises:
a) at least one amino acid substitution at a position corresponding to position 21, 23, 25, 80, 205, and/or 207 of SEQ ID NO: 162;
b) at least one amino acid substitution at a position corresponding to position 5, 38, 39, 94, 97, and/or 98 of SEQ ID NO: 163;
c) at least one amino acid substitution at a position corresponding to position 5, 21, 23, 24, 38, 39, 93, 97, and/or 98 of SEQ ID NO: 165;
d) at least one amino acid substitution at a position corresponding to position 21, 23, 25, 80, and/or 207 of SEQ ID NO: 167;
e) at least one amino acid substitution at a position corresponding to position 16 and/or 198 of SEQ ID NO: 203, SEQ ID NO: 204, SEQ ID NO: 205, or SEQ ID NO: 206; and/or
f) at least one amino acid substitution at a position corresponding to position 14 and/or 16 of SEQ ID NO: 207.

96. The antibody of any one of claims 91 to 95, wherein the variant IgG Fc polypeptide comprises:
a) at least one amino acid substitution at position 21, 23, 25, 80, 205, and/or 207 of SEQ ID NO: 162;
b) at least one amino acid substitution at position 5, 38, 39, 94, 97, and/or 98 of SEQ ID NO: 163;
c) at least one amino acid substitution at position 5, 21, 23, 24, 38, 39, 93, 97, and/or 98 of SEQ ID NO: 164;
d) at least one amino acid substation at position 21, 23, 25, 80, and/or 207 of SEQ ID NO: 165;
e) at least one amino acid substitution at position 16 and/or 198 of SEQ ID NO: 203, SEQ ID NO: 204, SEQ ID NO: 205, or SEQ ID NO: 206; and/or
f) at least one amino acid substitution at position 14 and/or 16 of SEQ ID NO: 207.

97. The antibody of any one of claims 91 to 96, wherein the variant IgG Fc polypeptide comprises:
a) a threonine at a position corresponding to position 21 of SEQ ID NO: 162, a leucine at a position corresponding to position 23 of SEQ ID NO: 162, an alanine at a position corresponding to position 25 of SEQ ID NO: 162, a glycine at a position corresponding to position 80 of SEQ ID NO: 162, an alanine at a position corresponding to position 205 of SEQ ID NO: 162, and/or a histidine at a position corresponding to position 207 of SEQ ID NO: 162;
b) a proline at a position corresponding to position 5 of SEQ ID NO: 163, a glycine at a position corresponding to position 38 of SEQ ID NO: 163, an arginine at a position corresponding to position 39 of SEQ ID NO: 163, an arginine at a position corresponding to position 93 of SEQ ID NO: 163, an isoleucine at a position corresponding to position 97 of SEQ ID NO: 163, and/or a glycine at a position corresponding to position 98 of SEQ ID NO: 163;
c) a proline at a position corresponding to position 5 of SEQ ID NO: 164, a threonine at a position corresponding to position 21 of SEQ ID NO: 164, a leucine at a position corresponding to position 23 of SEQ ID NO: 164, an isoleucine at a position corresponding to position 24 of SEQ ID NO: 164, a glycine at a position corresponding to position 38 of SEQ ID NO: 164, an arginine at a position corresponding to position 39 of SEQ ID NO: 164, an arginine at a position corresponding to position 93 of SEQ ID NO: 164, an isoleucine at a position corresponding to position 97 of SEQ ID NO: 164, and/or a glycine at a position corresponding to position 98 of SEQ ID NO: 164;
d) a threonine at a position corresponding to position 21 of SEQ ID NO: 165, a leucine at a position corresponding to position 23 of SEQ ID NO: 165, an alanine at a position corresponding to position 25 of SEQ ID NO: 165, a glycine at a position corresponding to position 80 of SEQ ID NO: 165, and/or a histidine at a position corresponding to position 207 of SEQ ID NO: 165;
e) a proline at a position corresponding to position 16 of SEQ ID NO: 203, SEQ ID NO: 204, SEQ ID NO: 205, or SEQ ID NO: 206 and/or an alanine at a position corresponding to position 198 of S SEQ ID NO: 203, SEQ ID NO: 204, SEQ ID NO: 205, or SEQ ID NO: 206; and/or
f) a cysteine at a position corresponding to position 14 of SEQ ID NO: 207 and/or a proline at a position corresponding to position 16 of SEQ ID NO: 207.

98. The antibody of any one of claims 91 to 97, wherein the variant IgG Fc polypeptide comprises:
a) a threonine at position 21 of SEQ ID NO: 162, a leucine at position 23 of SEQ ID NO: 162, an alanine at position 25 of SEQ ID NO: 162, a glycine at position 80 of SEQ ID NO: 162, an alanine at position 205 of SEQ ID NO: 162, and/or a histidine at position 207 of SEQ ID NO: 162;
b) a proline at position 5 of SEQ ID NO: 163, a glycine at position 38 of SEQ ID NO: 163, an arginine at position 39 of SEQ ID NO: 163, an arginine at position 93 of SEQ ID NO: 163, an isoleucine at position 97 of SEQ ID NO: 163, and/or a glycine at position 98 of SEQ ID NO: 163;
c) a proline at position 5 of SEQ ID NO: 164, a threonine at position 21 of SEQ ID NO: 164, a leucine at position 23 of SEQ ID NO: 164, an isoleucine at position 24 of SEQ ID NO: 164, a glycine at position 38 of SEQ ID NO: 164, an arginine at position 39 of SEQ ID NO: 164, an arginine at position 93 of SEQ ID NO: 164, an isoleucine at position 97 of SEQ ID NO: 164, and/or a glycine at position 98 of SEQ ID NO: 164;
d) a threonine at position 21 of SEQ ID NO: 165, a leucine at position 23 of SEQ ID NO: 165, an alanine at position 25 of SEQ ID NO: 165, a glycine at position 80 of SEQ ID NO: 165, and/or a histidine at position 207 of SEQ ID NO: 165;
e) a proline at position 16 of SEQ ID NO: 203, SEQ ID NO: 204, SEQ ID NO: 205, or SEQ ID NO: 206 and/or an alanine at position 198 of SEQ ID NO: 203, SEQ ID NO: 204, SEQ ID NO: 205, or SEQ ID NO: 206; and/or
f) a cysteine at position 14 of SEQ ID NO: 207 and/or a proline at position 16 of SEQ ID NO: 207.

99. The antibody of any one of claims 91 to 98, wherein the variant IgG Fc polypeptide comprises a CH1 region comprising at least one amino acid modification relative to a wild-type canine or feline IgG CH1 region, wherein the variant IgG Fc polypeptide comprises:
a) at least one amino acid substitution at a position corresponding to position 24 and/or position 30 of SEQ ID NO: 227, SEQ ID NO: 228, SEQ ID NO: 229, SEQ ID NO: 230, or SEQ ID NO: 237; or
b) at least one amino acid substitution at a position corresponding to position 24 and/or position 29 of SEQ ID NO: 238.

100. An antibody comprising a variant IgG Fc polypeptide comprising a CH1 region comprising at least one amino acid modification relative to a wild-type canine or feline IgG CH1 region, wherein the variant IgG Fc polypeptide comprises:
a) at least one amino acid substitution at a position corresponding to position 24 and/or position 30 of SEQ ID NO: 227, SEQ ID NO: 228, SEQ ID NO: 229, SEQ ID NO: 230, or SEQ ID NO: 237; or
b) at least one amino acid substitution at a position corresponding to position 24 and/or position 29 of SEQ ID NO: 238.

101. The antibody of any one of claims 91 to 100, wherein the variant IgG Fc polypeptide comprises a CH1 region comprising at least one amino acid modification relative to a wild-type canine or feline IgG CH1 region, wherein the variant IgG Fc polypeptide comprises:
a) at least one amino acid substitution at position 24 and/or position 30 of SEQ ID NO: 227, SEQ ID NO: 228, SEQ ID NO: 229, SEQ ID NO: 230, or SEQ ID NO: 237; or
b) at least one amino acid substitution at position 24 and/or position 29 of SEQ ID NO: 238.

102. The antibody of any one of claims 91 to 101, wherein the variant IgG Fc polypeptide comprises a CH1 region comprising at least one amino acid modification relative to a wild-type canine or feline IgG CH1 region, wherein the variant IgG Fc polypeptide comprises:
a) a leucine at a position corresponding to position 24 and/or an asparagine at a position corresponding to position 30 of SEQ ID NO: 227, SEQ ID NO: 228, SEQ ID NO: 229, SEQ ID NO: 230, or SEQ ID NO: 237; or
b) a leucine at a position corresponding to position 24 and/or an asparagine at a position corresponding to position 29 of SEQ ID NO: 238.

103. The antibody of any one of claims 91 to 102, wherein the variant IgG Fc polypeptide comprises a CH1 region comprising at least one amino acid modification relative to a wild-type canine or feline IgG CH1 region, wherein the variant IgG Fc polypeptide comprises:
a) a leucine at position 24 and/or an asparagine at position 30 of SEQ ID NO: 227, SEQ ID NO: 228, SEQ ID NO: 229, SEQ ID NO: 230, or SEQ ID NO: 237; or
b) a leucine at position 24 and/or an asparagine at position 29 of SEQ ID NO: 238.

104. The antibody of any one of the preceding claims, wherein the antibody comprises a wild-type or a variant canine or feline light chain constant region.

105. The antibody of any one of the preceding claims, wherein the antibody comprises a wild-type or a variant canine or feline light chain κ constant region.

106. The antibody of claim 104 or claim 105, wherein the variant light chain constant region comprises at least one amino acid modification relative to a wild-type canine or feline light chain κ constant region comprising:
a) at least one amino acid substitution at a position corresponding to position 11 and/or position 22 of SEQ ID NO: 235; or
b) at least one amino acid substitution at a position corresponding to position 11 and/or position 22 of SEQ ID NO: 241.

107. An antibody comprising a variant light chain constant region comprises at least one amino acid modification relative to a wild-type canine or feline light chain κ constant region comprising:
a) at least one amino acid substitution at a position corresponding to position 11 and/or position 22 of SEQ ID NO: 235; or
b) at least one amino acid substitution at a position corresponding to position 11 and/or position 22 of SEQ ID NO: 241.

108. The antibody of any one of claims 104 to 107, wherein the variant light chain constant region comprises at least one amino acid modification relative to a wild-type feline or canine light chain κ constant region comprising:
a) an alanine at a position corresponding to position 11 and/or an arginine at a position corresponding to position 22 of SEQ ID NO: 235; or
b) an alanine at a position corresponding to position 11 and/or an arginine at a position corresponding to position 22 of SEQ ID NO: 241.

109. The antibody of any one of claims 104 to 108, wherein the variant light chain constant region comprises at least one amino acid modification relative to a wild-type feline or canine light chain κ constant region comprising:
a) an alanine at position 11 and/or an arginine at position 22 of SEQ ID NO: 235; or
b) an alanine at position 11 and/or an arginine at position 22 of SEQ ID NO: 241.

110. The antibody of any one of claims 104 to 109, wherein the light chain constant region comprises an amino acid sequence of SEQ ID NO: 235, 236, 241, and/or 242.

111. The antibody of any one of the preceding claims, wherein the antibody is a bispecific antibody.

112. The antibody of any one of the preceding claims, wherein the antibody is a bispecific antibody comprising:
i) a first variant canine IgG Fc polypeptide comprising at least one amino acid modification relative to a first wild-type canine IgG Fc polypeptide and a second variant canine IgG Fc polypeptide comprising at least one amino acid modification relative to a second wild-type canine IgG Fc polypeptide, wherein:
a) the first variant canine IgG Fc polypeptide comprises an amino acid substitution at a position corresponding to position 138 of SEQ ID NO: 162, position 137 of SEQ ID NO: 163, position 137 of SEQ ID NO: 165, or position 138 of SEQ ID NO: 167, and/or
b) the second variant canine IgG Fc polypeptide comprises an amino acid substitution at a position corresponding to position 138 and/or position 140 of SEQ ID NO: 162, position 137 and/or position 139 of SEQ ID NO: 163, position 137 and/or position 139 of SEQ ID NO: 165, or position 138 and/or position 140 of SEQ ID NO: 167; or
ii) a first variant feline IgG Fc polypeptide comprising at least one amino acid modification relative to a first wild-type feline IgG Fc polypeptide and a second variant feline IgG Fc polypeptide comprising at least one amino acid modification relative to a second wild-type feline IgG Fc polypeptide, wherein:
a) the first variant feline IgG Fc polypeptide comprises an amino acid substitution at a position corresponding to position 154 of SEQ ID NO: 203, SEQ ID NO: 204, SEQ ID NO: 205, SEQ ID NO: 206, or SEQ ID NO: 207, and/or
b) the second variant feline IgG Fc polypeptide comprises an amino acid substitution at a position corresponding to position 154 and/or position 156 of SEQ ID NO: 203, SEQ ID NO: 204, SEQ ID NO: 205, SEQ ID NO: 206, or SEQ ID NO: 207.

113. An antibody or a bispecific antibody comprising:
i) a first variant canine IgG Fc polypeptide comprising at least one amino acid modification relative to a first wild-type canine IgG Fc polypeptide and a second variant canine IgG Fc polypeptide comprising at least one amino acid modification relative to a second wild-type canine IgG Fc polypeptide, wherein:
a) the first variant canine IgG Fc polypeptide comprises an amino acid substitution at a position corresponding to position 138 of SEQ ID NO: 162, position 137 of SEQ ID NO: 163, position 137 of SEQ ID NO: 165, or position 138 of SEQ ID NO: 167, and/or
b) the second variant canine IgG Fc polypeptide comprises an amino acid substitution at a position corresponding to position 138 and/or position 140 of SEQ ID NO: 162, position 137 and/or position 139 of SEQ ID NO: 163, position 137 and/or position 139 of SEQ ID NO: 165, or position 138 and/or position 140 of SEQ ID NO: 167;
ii) a first variant feline IgG Fc polypeptide comprising at least one amino acid modification relative to a first wild-type feline IgG Fc polypeptide and a second variant feline IgG Fc polypeptide comprising at least one amino acid modification relative to a second wild-type feline IgG Fc polypeptide, wherein:
a) the first variant feline IgG Fc polypeptide comprises an amino acid substitution at a position corresponding to position 154 of SEQ ID NO: 203, SEQ ID NO: 204, SEQ ID NO: 205, SEQ ID NO: 206, or SEQ ID NO: 207, and/or
b) the second variant feline IgG Fc polypeptide comprises an amino acid substitution at a position corresponding to position 154 and/or position 156 of SEQ ID NO: 203, SEQ ID NO: 204, SEQ ID NO: 205, SEQ ID NO: 206, or SEQ ID NO: 207; or
iii) a first variant equine IgG Fc polypeptide comprising at least one amino acid modification relative to a first wild-type equine IgG Fc polypeptide and a second variant equine IgG Fc polypeptide comprising at least one amino acid modification relative to a second wild-type equine IgG Fc polypeptide, wherein:
a) the first variant equine IgG Fc polypeptide comprises an amino acid substitution at a position corresponding to position 130 of SEQ ID NO: 254, SEQ ID NO: 255, SEQ ID NO: 256, SEQ ID NO: 257, SEQ ID NO: 258, SEQ ID NO: 259, or SEQ ID NO: 260, and/or
b) the second variant equine IgG Fc polypeptide comprises an amino acid substitution at a position corresponding to position 130 and/or position 132 of SEQ ID NO: 254, SEQ ID NO: 255, SEQ ID NO: 256, SEQ ID NO: 257, SEQ ID NO: 258, SEQ ID NO: 259, or SEQ ID NO: 260.

114. The antibody of claim 112 or claim 113, wherein:
a) the first variant canine IgG Fc polypeptide comprises a tryptophan at a position corresponding to position 138 of SEQ ID NO: 162, position 137 of SEQ ID NO: 163, position 137 of SEQ ID NO: 165, or position 138 of SEQ ID NO: 167;
b) the second variant canine IgG Fc polypeptide comprises a serine at a position corresponding to position 138 and/or an alanine at a position corresponding to position 140 of SEQ ID NO: 162, a serine at a position corresponding to position 137 and/or an alanine at a position corresponding to position 139 of SEQ ID NO: 163, a serine at a position corresponding to position 137 and/or an alanine at a position corresponding to position 139 of SEQ ID NO: 165, or a serine at a position corresponding to position 138 and/or an alanine at a position corresponding to position 140 of SEQ ID NO: 167;
c) the first variant feline IgG Fc polypeptide comprises a tryptophan at a position corresponding to position 154 of SEQ ID NO: 203, SEQ ID NO: 204, SEQ ID NO: 205, SEQ ID NO: 206, or SEQ ID NO: 207;
d) the second variant feline IgG Fc polypeptide comprises a serine at a position corresponding to position 154 and/or an alanine at a position corresponding to position 156 of SEQ ID NO: 203, SEQ ID NO: 204, SEQ ID NO: 205, SEQ ID NO: 206, or SEQ ID NO: 207;
e) the first variant equine IgG Fc polypeptide comprises a tryptophan at a position corresponding to position 130 of SEQ ID NO: 254, SEQ ID NO: 255, SEQ ID NO: 256, SEQ ID NO: 257, SEQ ID NO: 258, SEQ ID NO: 259, or SEQ ID NO: 260; and/or
f) the second variant equine IgG Fc polypeptide comprises a serine at a position corresponding to position 130 and/or an alanine at a position corresponding to position 132 of SEQ ID NO: 254, SEQ ID NO: 255, SEQ ID NO: 256, SEQ ID NO: 257, SEQ ID NO: 258, SEQ ID NO: 259, or SEQ ID NO: 260.

115. The antibody of any one of claims 112 to 114, wherein:
a) the first variant canine IgG Fc polypeptide comprises an amino acid substitution at position 138 of SEQ ID NO: 162, position 137 of SEQ ID NO: 163, position 137 of SEQ ID NO: 165, or position 138 of SEQ ID NO: 167;
b) the second variant canine IgG Fc polypeptide comprises an amino acid substitution at position 138 and/or position 140 of SEQ ID NO: 162, an amino acid substitution at position 137 and/or position 139 of SEQ ID NO: 163, an amino acid substitution at position 137 and/or position 139 of SEQ ID NO: 165, or an amino acid substitution at position 138 and/or position 140 of SEQ ID NO: 167;
c) the first variant feline IgG Fc polypeptide comprises an amino acid substitution at position 154 of SEQ ID NO: 203, SEQ ID NO: 204, SEQ ID NO: 205, SEQ ID NO: 206, or SEQ ID NO: 207;
d) the second variant feline IgG Fc polypeptide comprises an amino acid substitution at position 154 and/or position 156 of SEQ ID NO: 203, SEQ ID NO: 204, SEQ ID NO: 205, SEQ ID NO: 206, or SEQ ID NO: 207;
e) the first variant equine IgG Fc polypeptide comprises an amino acid substitution at position 130 of SEQ ID NO: 254, SEQ ID NO: 255, SEQ ID NO: 256, SEQ ID NO: 257, SEQ ID NO: 258, SEQ ID NO: 259, or SEQ ID NO: 260; and/or
f) the second variant equine IgG Fc polypeptide comprises an amino acid substitution at position 130 and/or position 132 of SEQ ID NO: 254, SEQ ID NO: 255, SEQ ID NO: 256, SEQ ID NO: 257, SEQ ID NO: 258, SEQ ID NO: 259, or SEQ ID NO: 260.

116. The antibody of any one of claims 112 to 115, wherein:
a) the first variant canine IgG Fc polypeptide comprises a tryptophan at position 138 of SEQ ID NO: 162, position 137 of SEQ ID NO: 163, position 137 of SEQ ID NO: 165, or position 138 of SEQ ID NO: 167;
b) the second variant canine IgG Fc polypeptide comprises a serine at position 138 and/or an alanine at position 140 of SEQ ID NO: 162, a serine at position 137 and/or an alanine at position 139 of SEQ ID NO: 163, a serine at position 137 and/or an alanine at position 139 of SEQ ID NO: 165, or a serine at position 138 and/or an alanine at position 140 of SEQ ID NO: 167;
c) the first variant feline IgG Fc polypeptide comprises a tryptophan at position 154 of SEQ ID NO: 203, SEQ ID NO: 204, SEQ ID NO: 205, SEQ ID NO: 206, or SEQ ID NO: 207;
d) the second variant feline IgG Fc polypeptide comprises a serine at position 154 and/or an alanine at position 156 of SEQ ID NO: 203, SEQ ID NO: 204, SEQ ID NO: 205, SEQ ID NO: 206, or SEQ ID NO: 207;
e) the first variant equine IgG Fc polypeptide comprises a tryptophan at position 130 of SEQ ID NO: 254, SEQ ID NO: 255, SEQ ID NO: 256, SEQ ID NO: 257, SEQ ID NO: 258, SEQ ID NO: 259, or SEQ ID NO: 260; and/or
f) the second variant equine IgG Fc polypeptide comprises a serine at position 130 and/or an alanine at position 132 of SEQ ID NO: 254, SEQ ID NO: 255, SEQ ID NO: 256, SEQ ID NO: 257, SEQ ID NO: 258, SEQ ID NO: 259, or SEQ ID NO: 260.

117. The antibody of any one of claims 112 to 116, wherein the first wild-type IgG Fc polypeptide and the second wild-type IgG Fc polypeptide are from the same IgG subtype.

118. The antibody of any one of claims 112 to 117, wherein the first wild-type IgG Fc polypeptide and the second wild-type IgG Fc polypeptide are from a different IgG subtype.

119. The antibody of any one of the preceding claims, wherein the antibody comprises an IgG Fc polypeptide comprising an amino acid sequence of SEQ ID NO: 162, 163, 164, 165, 166, 167, 168, 169, 170, 171, 172, 173, 174, 175, 176, 177, 178, 179, 180, 181, 182, 183, 184, 185, 186, 187, 188, 189, 190, 191, 192, 193, 194, 195, 196, 197, 198, 199, 200, 201, 202, 203, 204, 205, 206, 207, 208, 209, 210, 211, 212, 213, 214, 215, 216, 217, 218, 219, 220, 221, 222, 223, 224, 225, 226, 227, 228, 229, 230, 231, 232, 233, 234, 237, 238, 239, 240, 254, 255, 256, 257, 258, 259, 260, 261, 262, 263, 264, 265, 266, and/or 267.

120. The antibody of any one of the preceding claims, wherein the antibody comprises:
a. (i) a heavy chain amino acid sequence of SEQ ID NO: 25 or SEQ ID NO: 47; (ii) a light chain amino acid sequence of SEQ ID NO: 26 or SEQ ID NO: 48; or (iii) a heavy chain amino acid sequence as in (i) and a light chain sequence as in (ii);
b. (i) a heavy chain amino acid sequence of SEQ ID NO: 51 or SEQ ID NO: 55; (ii) a light chain amino acid sequence of SEQ ID NO: 52 or SEQ ID NO: 56; or (iii) a heavy chain amino acid sequence as in (i) and a light chain sequence as in (ii);
c. (i) a heavy chain amino acid sequence of SEQ ID NO: 71, SEQ ID NO: 72, SEQ ID NO: 75, SEQ ID NO: 76, or SEQ ID NO: 276; (ii) a light chain amino acid sequence of SEQ ID NO: 73, SEQ ID NO: 74, SEQ ID NO: 77, SEQ ID NO: 78, or SEQ ID NO: 277; or (iii) a heavy chain amino acid sequence as in (i) and a light chain sequence as in (ii);
d. (i) a heavy chain amino acid sequence of SEQ ID NO: 79, SEQ ID NO: 80, SEQ ID NO: 82, or SEQ ID NO: 83; (ii) a light chain amino acid sequence of SEQ ID NO: 81 or SEQ ID NO: 84; or (iii) a heavy chain amino acid sequence as in (i) and a light chain sequence as in (ii);
e. (i) a heavy chain amino acid sequence of SEQ ID NO: 243; (ii) a light chain amino acid sequence of SEQ ID NO: 244; or (iii) a heavy chain amino acid sequence as in (i) and a light chain sequence as in (ii);
f. (i) a heavy chain amino acid sequence of SEQ ID NO: 348 or SEQ ID NO: 349; (ii) a light chain amino acid sequence of SEQ ID NO: 350; or (iii) a heavy chain amino acid sequence as in (i) and a light chain sequence as in (ii); or
g. (i) a heavy chain amino acid sequence of SEQ ID NO: 351 or SEQ ID NO: 352; (ii) a light chain amino acid sequence of SEQ ID NO: 253; or (iii) a heavy chain amino acid sequence as in (i) and a light chain sequence as in (ii).

121. The antibody of any one of the preceding claims, wherein the antibody is a bispecific antibody that binds to IL4R and one or more antigens selected from IL17, IL31, TNFα, CD20, CD19, CD25, IL4, IL13, IL23, IgE, CD11α, IL6R, α4-Intergrin, IL12, IL1β, or BlyS.

122. The antibody of any one of the preceding claims, wherein the antibody comprises (i) a heavy chain amino acid sequence of SEQ ID NO: 245; (ii) a light chain amino acid sequence of SEQ ID NO: 246; or (iii) a heavy chain amino acid sequence as in (i) and a light chain sequence as in (ii).

123. The antibody of any one of the preceding claims, wherein the antibody is an antibody fragment, such as an Fv, scFv, Fab, Fab′, F(ab′)2, or Fab′-SH fragment.

124. An isolated nucleic acid encoding the antibody of any one of the preceding claims.

125. A host cell comprising the nucleic acid of claim 124.

126. A host cell that expresses the antibody of any one of claims 1 to 123.

127. A method of producing an antibody comprising culturing the host cell of claim 125 or claim 126 and isolating the antibody.

128. A pharmaceutical composition comprising the antibody of any one of claims 1 to 123 and a pharmaceutically acceptable carrier.

129. A method of treating a companion animal species having an IL4/IL13-induced condition, the method comprising administering to the companion animal species a therapeutically effective amount of the antibody of any one of claims 1 to 123 or the pharmaceutical composition of claim 128.

130. The method of claim 129, wherein the companion animal species is canine, feline, or equine.

131. The method of claim 129 or claim 130, wherein the IL4/IL13-induced condition is a pruritic or allergic condition.

132. The method of any one of claims 129 to 131, wherein the IL4/IL13-induced condition is selected from atopic dermatitis, allergic dermatitis, pruritus, asthma, psoriasis, scleroderma, and eczema.

133. The method of any one of claims 129 to 132, wherein the antibody or the pharmaceutical composition is administered parenterally.

134. The method of any one of claims 129 to 133, wherein the antibody or the pharmaceutical composition is administered by an intramuscular route, an intraperitoneal route, an intracerebrospinal route, a subcutaneous route, an intra-arterial route, an intrasynovial route, an intrathecal route, or an inhalation route.

135. The method of any one of claims 129 to 134, wherein the method comprises administering in combination with the antibody or the pharmaceutical composition a Jak inhibitor, a PI3K inhibitor, an ERK inhibitor.

136. The method of any one of claims 129 to 135, wherein the method comprises administering in combination with the antibody or the pharmaceutical composition one or more antibodies selected from an anti-IL17 antibody, an anti-IL31 antibody, an anti-TNFα antibody, an anti-CD20 antibody, an anti-CD19 antibody, an anti-CD25 antibody, an anti-IL4 antibody, an anti-IL13 antibody, an anti-IL23 antibody, an anti-IgE antibody, an anti-CD11α antibody, anti-IL6R antibody, anti-α4-Intergrin antibody, an anti-IL12 antibody, an anti-IL1β antibody, and an anti-BlyS antibody.

137. A method of reducing IL4 and/or IL13 signaling function in a cell, the method comprising exposing to the cell the antibody of any one of claims 1 to 123 or the pharmaceutical composition of claim 64 under conditions permissive for binding of the antibody to extracellular IL4 and/or IL13, thereby reducing binding of IL4 and/or IL13 to IL4R and/or reducing IL4 and/or IL13 signaling function by the cell.

138. The method of claim 137, wherein the cell is exposed to the antibody or the pharmaceutical composition ex vivo.

139. The method of claim 137, wherein the cell is exposed to the antibody or the pharmaceutical composition in vivo.

140. The method of any one of claims 137 to 139, wherein the cell is a canine cell, a feline cell, or an equine cell.

141. The method of any one of claims 137 to 140, wherein the antibody reduces IL4 and/or IL13 signaling function in the cell, as determined by a reduction in STAT6 phosphorylation.

142. The method of any one of claims 137 to 141, wherein the cell is a canine DH82 cell.

143. A method for detecting IL4R in a sample from a companion animal species comprising contacting the sample with the antibody of any one of claims 1 to 123 or the pharmaceutical composition of claim 64 under conditions permissive for binding of the antibody to IL4R.

144. The method of claim 141, wherein the sample is a biological sample obtained from a canine, a feline, or an equine.

145. A method of screening for a molecule that inhibits IL4 and/or IL13 signaling function comprising exposing to a canine DH82 cell the molecule and detecting whether there is a reduction in STAT6 phosphorylation.

146. The method of claim 145, wherein the molecule comprises an anti-IL4R antibody or small molecule antagonist of IL4R.

147. The method of claim 145 or claim 146, wherein the molecule comprises an anti-IL13R antibody or small molecule antagonist of IL13R.

148. The method of any one of claims 145 to 147, wherein the molecule comprises an anti-IL4 antibody or small molecule antagonist of IL4.

149. The method of any one of claims 145 to 148, wherein the molecule comprises an anti-IL13 antibody or small molecule antagonist of IL13.

The application's sequence listing, which the Patent Office published only in electronic form, follows.

SEQUENCE LISTING (357 sequences)

SEQ ID NO: 1 - protein, 10 aa, Artificial Sequence
  Synthetic: CDR-H1
GYTFTSYVMH

SEQ ID NO: 2 - protein, 17 aa, Artificial Sequence
  Synthetic: CDR-H2
  misc_feature (5)..(5): X is K or A
  misc_feature (14)..(14): X is K or A
  misc_feature (15)..(15): X is F or V
  misc_feature (16)..(16): X is K or Q
YINPXNDGTFYNGXXXG

SEQ ID NO: 3 - protein, 7 aa, Artificial Sequence
  Synthetic: CDR-H3
  misc_feature (2)..(2): X is N or Y
  misc_feature (5)..(5): X is I or F
FXYGXAY

SEQ ID NO: 4 - protein, 11 aa, Artificial Sequence
  Synthetic: CDR-L1
RASQEISGYLS

SEQ ID NO: 5 - protein, 7 aa, Artificial Sequence
  Synthetic: CDR-L2
  misc_feature (4)..(4): X is T or N
  misc_feature (5)..(5): X is R or L
  misc_feature (7)..(7): X is S or T
AASXXDX

SEQ ID NO: 6 - protein, 9 aa, Artificial Sequence
  Synthetic: CDR-L3
VQYASYPWT

SEQ ID NO: 7 - protein, 10 aa, Artificial Sequence
  Synthetic: Clone B CDR-H1
GYTFTSYVMH

SEQ ID NO: 8 - protein, 17 aa, Artificial Sequence
  Synthetic: Clone B CDR-H2
YINPKNDGTFYNGKFKG

SEQ ID NO: 9 - protein, 7 aa, Artificial Sequence
  Synthetic: Clone B CDR-H3
FNYGIAY

SEQ ID NO: 10 - protein, 25 aa, Artificial Sequence
  Synthetic: Clone B HC-FR1
EVKLEESGPELVKPGASVKMSCKAS

SEQ ID NO: 11 - protein, 14 aa, Artificial Sequence
  Synthetic: Clone B HC-FR2
WVKQKPGQGLEWIG

SEQ ID NO: 12 - protein, 32 aa, Artificial Sequence
  Synthetic: Clone B HC-FR3
KATLTSDKSSSTAYMELSSLTSEDSAVYYCAA

SEQ ID NO: 13 - protein, 11 aa, Artificial Sequence
  Synthetic: Clone B HC-FR4
WGQGTLVTVSS

SEQ ID NO: 14 - protein, 11 aa, Artificial Sequence
  Synthetic: Clone B CDR-L1
RASQEISGYLS

SEQ ID NO: 15 - protein, 7 aa, Artificial Sequence
  Synthetic: Clone B CDR-L2
AASTLDS

SEQ ID NO: 16 - protein, 9 aa, Artificial Sequence
  Synthetic: Clone B CDR-L3
VQYASYPWT

SEQ ID NO: 17 - protein, 26 aa, Artificial Sequence
  Synthetic: Clone B LC-FR1
DIVLTQTPSSLSASLGERVSLTCRAS

SEQ ID NO: 18 - protein, 15 aa, Artificial Sequence
  Synthetic: Clone B LC-FR2
WLQQKPDGTIKRLIY

SEQ ID NO: 19 - protein, 32 aa, Artificial Sequence
  Synthetic: Clone B LC-FR3
GVPKRFSGSRSGSDFSLTISSLESEDFADYYC

SEQ ID NO: 20 - protein, 10 aa, Artificial Sequence
  Synthetic: Clone B LC-FR4
FGGGARLEIK

SEQ ID NO: 21 - protein, 116 aa, Artificial Sequence
  Synthetic: Clone B variable HC
EVKLEESGPELVKPGASVKMSCKASGYTFTSYVMHWVKQKPGQGLEWIGYINPKNDGTFYNGKFKGKATLTSDKSSSTAYMELSSLTSEDSAVYYCAAFNYGIAYWGQGTLVTVSS

SEQ ID NO: 22 - protein, 106 aa, Artificial Sequence
  Synthetic: Clone B variable LC
IVLTQTPSSLSASLGERVSLTCRASQEISGYLSWLQQKPDGTIKRLIYAASTLDSGVPKRFSGSRSGSDFSLTISSLESEDFADYYCVQYASYPWTFGGGARLEIK

SEQ ID NO: 23 - protein, 135 aa, Artificial Sequence
  Synthetic: Clone B variable HC with leader sequence
MAVLGLLLCLVTFPSCVLSEVKLEESGPELVKPGASVKMSCKASGYTFTSYVMHWVKQKPGQGLEWIGYINPKNDGTFYNGKFKGKATLTSDKSSSTAYMELSSLTSEDSAVYYCAAFNYGIAYWGQGTLVTVSS

SEQ ID NO: 24 - protein, 126 aa, Artificial Sequence
  Synthetic: Clone B variable LC with leader sequence
METDTLLLWVLLLWVPGSTGIVLTQTPSSLSASLGERVSLTCRASQEISGYLSWLQQKPDGTIKRLIYAASTLDSGVPKRFSGSRSGSDFSLTISSLESEDFADYYCVQYASYPWTFGGGARLEIK

SEQ ID NO: 25 - protein, 440 aa, Artificial Sequence
  Synthetic: Clone B HC
EVKLEESGPELVKPGASVKMSCKASGYTFTSYVMHWVKQKPGQGLEWIGYINPKNDGTFYNGKFKGKATLTSDKSSSTAYMELSSLTSEDSAVYYCAAFNYGIAYWGQGTLVTVSSAKTTPPSVYPLAPGSAAQTNSMVTLGCLVKGYFPEPVTVTWNSGSLSSGVHTFPAVLQSDLYTLSSSVTVPSSPRPSETVTCNVAHPASSTKVDKKIVPRDCGCKPCICTVPEVSSVFIFPPKPKDVLTITLTPKVTCVVVDISKDDPEVQFSWFVDDVEVHTAQTQPREEQFNSTFRSVSELPIMHQDWLNGKEFKCRVNSAAFPAPIEKTISKTKGRPKAPQVYTIPPPKEQMAKDKVSLTCMITDFFPEDITVEWQWNGQPAENYKNTQPIMNTNGSYFVYSKLNVQKSNWEAGNTFTCSVLHEGLHNHHTEKSLSHSPGK

SEQ ID NO: 26 - protein, 213 aa, Artificial Sequence
  Synthetic: Clone B LC
IVLTQTPSSLSASLGERVSLTCRASQEISGYLSWLQQKPDGTIKRLIYAASTLDSGVPKRFSGSRSGSDFSLTISSLESEDFADYYCVQYASYPWTFGGGARLEIKRADAAPTVSIFPPSSEQLTSGGASVVCFLNNFYPKDINVKWKIDGSERQNGVLNSWTDQDSKDSTYSMSSTLTLTKDEYERHNSYTCEATHKTSTSPIVKSFNRNEC

SEQ ID NO: 27 - protein, 459 aa, Artificial Sequence
  Synthetic: Clone B HC with leader sequence
MAVLGLLLCLVTFPSCVLSEVKLEESGPELVKPGASVKMSCKASGYTFTSYVMHWVKQKPGQGLEWIGYINPKNDGTFYNGKFKGKATLTSDKSSSTAYMELSSLTSEDSAVYYCAAFNYGIAYWGQGTLVTVSSAKTTPPSVYPLAPGSAAQTNSMVTLGCLVKGYFPEPVTVTWNSGSLSSGVHTFPAVLQSDLYTLSSSVTVPSSPRPSETVTCNVAHPASSTKVDKKIVPRDCGCKPCICTVPEVSSVFIFPPKPKDVLTITLTPKVTCVVVDISKDDPEVQFSWFVDDVEVHTAQTQPREEQFNSTFRSVSELPIMHQDWLNGKEFKCRVNSAAFPAPIEKTISKTKGRPKAPQVYTIPPPKEQMAKDKVSLTCMITDFFPEDITVEWQWNGQPAENYKNTQPIMNTNGSYFVYSKLNVQKSNWEAGNTFTCSVLHEGLHNHHTEKSLSHSPGK

SEQ ID NO: 28 - protein, 233 aa, Artificial Sequence
  Synthetic: Clone B LC with leader sequence
METDTLLLWVLLLWVPGSTGIVLTQTPSSLSASLGERVSLTCRASQEISGYLSWLQQKPDGTIKRLIYAASTLDSGVPKRFSGSRSGSDFSLTISSLESEDFADYYCVQYASYPWTFGGGARLEIKRADAAPTVSIFPPSSEQLTSGGASVVCFLNNFYPKDINVKWKIDGSERQNGVLNSWTDQDSKDSTYSMSSTLTLTKDEYERHNSYTCEATHKTSTSPIVKSFNRNEC

SEQ ID NO: 29 - protein, 10 aa, Artificial Sequence
  Synthetic: Clone I CDR-H1
GYTFTSYVMH

SEQ ID NO: 30 - protein, 17 aa, Artificial Sequence
  Synthetic: Clone I CDR-H2
YINPNNDGTFYNGKFKG

SEQ ID NO: 31 - protein, 7 aa, Artificial Sequence
  Synthetic: Clone I CDR-H3
FYYGFAY

SEQ ID NO: 32 - protein, 25 aa, Artificial Sequence
  Synthetic: Clone I HC-FR1
EVQLQQSGPELVKPGASVKMSCKAS

SEQ ID NO: 33 - protein, 14 aa, Artificial Sequence
  Synthetic: Clone I HC-FR2
WVKQKPGQGLEWIG

SEQ ID NO: 34 - protein, 32 aa, Artificial Sequence; identical to SEQ ID NO: 12
  Synthetic: Clone I HC-FR3

SEQ ID NO: 35 - protein, 11 aa, Artificial Sequence
  Synthetic: Clone I HC-FR4
WGQGTLVTVSA

SEQ ID NO: 36 - protein, 11 aa, Artificial Sequence
  Synthetic: Clone I CDR-L1
RASQEISGYLS

SEQ ID NO: 37 - protein, 7 aa, Artificial Sequence
  Synthetic: Clone I CDR-L2
AASTLDS

SEQ ID NO: 38 - protein, 9 aa, Artificial Sequence
  Synthetic: Clone I CDR-L3
LQYASYPWT

SEQ ID NO: 39 - protein, 26 aa, Artificial Sequence
  Synthetic: Clone I LC-FR1
DIVLTQSPSSLSASLGERVSLTCRAS

SEQ ID NO: 40 - protein, 15 aa, Artificial Sequence
  Synthetic: Clone I LC-FR2
WLQQKPDGTIKRLIY

SEQ ID NO: 41 - protein, 32 aa, Artificial Sequence; identical to SEQ ID NO: 19
  Synthetic: Clone I LC-FR3

SEQ ID NO: 42 - protein, 10 aa, Artificial Sequence
  Synthetic: Clone I LC-FR4
FGGGAKLEIK

SEQ ID NO: 43 - protein, 116 aa, Artificial Sequence
  Synthetic: Clone I variable HC
EVQLQQSGPELVKPGASVKMSCKASGYTFTSYVMHWVKQKPGQGLEWIGYINPNNDGTFYNGKFKGKATLTSDKSSSTAYMELSSLTSEDSAVYYCAAFYYGFAYWGQGTLVTVSA

SEQ ID NO: 44 - protein, 107 aa, Artificial Sequence
  Synthetic: Clone I variable LC
DIVLTQSPSSLSASLGERVSLTCRASQEISGYLSWLQQKPDGTIKRLIYAASTLDSGVPKRFSGSRSGSDFSLTISSLESEDFADYYCLQYASYPWTFGGGAKLEIK

SEQ ID NO: 45 - protein, 135 aa, Artificial Sequence
  Synthetic: Clone I variable HC with leader sequence
MAVLGLLLCLVTFPSCVLSEVQLQQSGPELVKPGASVKMSCKASGYTFTSYVMHWVKQKPGQGLEWIGYINPNNDGTFYNGKFKGKATLTSDKSSSTAYMELSSLTSEDSAVYYCAAFYYGFAYWGQGTLVTVSA

SEQ ID NO: 46 - protein, 127 aa, Artificial Sequence
  Synthetic: Clone I variable LC with leader sequence
METDTLLLWVLLLWVPGSTGDIVLTQSPSSLSASLGERVSLTCRASQEISGYLSWLQQKPDGTIKRLIYAASTLDSGVPKRFSGSRSGSDFSLTISSLESEDFADYYCLQYASYPWTFGGGAKLEIK

SEQ ID NO: 47 - protein, 440 aa, Artificial Sequence
  Synthetic: Clone I HC
EVQLQQSGPELVKPGASVKMSCKASGYTFTSYVMHWVKQKPGQGLEWIGYINPNNDGTFYNGKFKGKATLTSDKSSSTAYMELSSLTSEDSAVYYCAAFYYGFAYWGQGTLVTVSAAKTTPPSVYPLAPGSAAQTNSMVTLGCLVKGYFPEPVTVTWNSGSLSSGVHTFPAVLQSDLYTLSSSVTVPSSPRPSETVTCNVAHPASSTKVDKKIVPRDCGCKPCICTVPEVSSVFIFPPKPKDVLTITLTPKVTCVVVDISKDDPEVQFSWFVDDVEVHTAQTQPREEQFNSTFRSVSELPIMHQDWLNGKEFKCRVNSAAFPAPIEKTISKTKGRPKAPQVYTIPPPKEQMAKDKVSLTCMITDFFPEDITVEWQWNGQPAENYKNTQPIMNTNGSYFVYSKLNVQKSNWEAGNTFTCSVLHEGLHNHHTEKSLSHSPGK

SEQ ID NO: 48 - protein, 214 aa, Artificial Sequence
  Synthetic: Clone I LC
DIVLTQSPSSLSASLGERVSLTCRASQEISGYLSWLQQKPDGTIKRLIYAASTLDSGVPKRFSGSRSGSDFSLTISSLESEDFADYYCLQYASYPWTFGGGAKLEIKRADAAPTVSIFPPSSEQLTSGGASVVCFLNNFYPKDINVKWKIDGSERQNGVLNSWTDQDSKDSTYSMSSTLTLTKDEYERHNSYTCEATHKTSTSPIVKSFNRNEC

SEQ ID NO: 49 - protein, 459 aa, Artificial Sequence
  Synthetic: Clone I HC with leader sequence
MAVLGLLLCLVTFPSCVLSEVQLQQSGPELVKPGASVKMSCKASGYTFTSYVMHWVKQKPGQGLEWIGYINPNNDGTFYNGKFKGKATLTSDKSSSTAYMELSSLTSEDSAVYYCAAFYYGFAYWGQGTLVTVSAAKTTPPSVYPLAPGSAAQTNSMVTLGCLVKGYFPEPVTVTWNSGSLSSGVHTFPAVLQSDLYTLSSSVTVPSSPRPSETVTCNVAHPASSTKVDKKIVPRDCGCKPCICTVPEVSSVFIFPPKPKDVLTITLTPKVTCVVVDISKDDPEVQFSWFVDDVEVHTAQTQPREEQFNSTFRSVSELPIMHQDWLNGKEFKCRVNSAAFPAPIEKTISKTKGRPKAPQVYTIPPPKEQMAKDKVSLTCMITDFFPEDITVEWQWNGQPAENYKNTQPIMNTNGSYFVYSKLNVQKSNWEAGNTFTCSVLHEGLHNHHTEKSLSHSPGK

SEQ ID NO: 50 - protein, 234 aa, Artificial Sequence
  Synthetic: Clone I LC with leader sequence
METDTLLLWVLLLWVPGSTGDIVLTQSPSSLSASLGERVSLTCRASQEISGYLSWLQQKPDGTIKRLIYAASTLDSGVPKRFSGSRSGSDFSLTISSLESEDFADYYCLQYASYPWTFGGGAKLEIKRADAAPTVSIFPPSSEQLTSGGASVVCFLNNFYPKDINVKWKIDGSERQNGVLNSWTDQDSKDSTYSMSSTLTLTKDEYERHNSYTCEATHKTSTSPIVKSFNRNEC

SEQ ID NO: 51 - protein, 451 aa, Artificial Sequence
  Synthetic: Chimeric Clone B variable HC and canine IgG-B (Chimeric B HC)
EVKLEESGPELVKPGASVKMSCKASGYTFTSYVMHWVKQKPGQGLEWIGYINPKNDGTFYNGKFKGKATLTSDKSSSTAYMELSSLTSEDSAVYYCAAFNYGIAYWGQGTLVTVSSASTTAPSVFPLAPSCGSTSGSTVALACLVSGYFPEPVTVSWNSGSLTSGVHTFPSVLQSSGLYSLSSMVTVPSSRWPSETFTCNVAHPASKTKVDKPVPKRENGRVPRPPDCPKCPAPEMLGGPSVFIFPPKPKDTLLIARTPEVTCVVVDLDPEDPEVQISWFVDGKQMQTAKTQPREEQFNGTYRVVSVLPIGHQDWLKGKQFTCKVNNKALPSPIERTISKARGQAHQPSVYVLPPSREELSKNTVSLTCLIKDFFPPDIDVEWQSNGQQEPESKYRTTPPQLDEDGSYFLYSKLSVDKSRWQRGDTFICAVMHEALHNHYTQESLSHSPGK

SEQ ID NO: 52 - protein, 216 aa, Artificial Sequence
  Synthetic: Chimeric Clone B variable LC and canine ? light constant region  (Chimeric B LC)
IVLTQTPSSLSASLGERVSLTCRASQEISGYLSWLQQKPDGTIKRLIYAASTLDSGVPKRFSGSRSGSDFSLTISSLESEDFADYYCVQYASYPWTFGGGARLEIKRNDAQPAVYLFQPSPDQLHTGSASVVCLLNSFYPKDINVKWKVDGVIQDTGIQESVTEQDKDSTYSLSSTLTMSSTEYLSHELYSCEITHKSLPSTLIKSFQRSECQRVD

SEQ ID NO: 53 - protein, 470 aa, Artificial Sequence
  Synthetic: Chimeric Clone B variable HC and canine IgG-B with leader sequence
MAVLGLLLCLVTFPSCVLSEVKLEESGPELVKPGASVKMSCKASGYTFTSYVMHWVKQKPGQGLEWIGYINPKNDGTFYNGKFKGKATLTSDKSSSTAYMELSSLTSEDSAVYYCAAFNYGIAYWGQGTLVTVSSASTTAPSVFPLAPSCGSTSGSTVALACLVSGYFPEPVTVSWNSGSLTSGVHTFPSVLQSSGLYSLSSMVTVPSSRWPSETFTCNVAHPASKTKVDKPVPKRENGRVPRPPDCPKCPAPEMLGGPSVFIFPPKPKDTLLIARTPEVTCVVVDLDPEDPEVQISWFVDGKQMQTAKTQPREEQFNGTYRVVSVLPIGHQDWLKGKQFTCKVNNKALPSPIERTISKARGQAHQPSVYVLPPSREELSKNTVSLTCLIKDFFPPDIDVEWQSNGQQEPESKYRTTPPQLDEDGSYFLYSKLSVDKSRWQRGDTFICAVMHEALHNHYTQESLSHSPGK

SEQ ID NO: 54 - protein, 236 aa, Artificial Sequence
  Synthetic: Chimeric Clone B variable LC and canine ? light constant region with leader sequence
METDTLLLWVLLLWVPGSTGIVLTQTPSSLSASLGERVSLTCRASQEISGYLSWLQQKPDGTIKRLIYAASTLDSGVPKRFSGSRSGSDFSLTISSLESEDFADYYCVQYASYPWTFGGGARLEIKRNDAQPAVYLFQPSPDQLHTGSASVVCLLNSFYPKDINVKWKVDGVIQDTGIQESVTEQDKDSTYSLSSTLTMSSTEYLSHELYSCEITHKSLPSTLIKSFQRSECQRVD

SEQ ID NO: 55 - protein, 451 aa, Artificial Sequence
  Synthetic: Chimeric Clone I variable HC and canine IgG-B (Chimeric I HC)
EVQLQQSGPELVKPGASVKMSCKASGYTFTSYVMHWVKQKPGQGLEWIGYINPNNDGTFYNGKFKGKATLTSDKSSSTAYMELSSLTSEDSAVYYCAAFYYGFAYWGQGTLVTVSAASTTAPSVFPLAPSCGSTSGSTVALACLVSGYFPEPVTVSWNSGSLTSGVHTFPSVLQSSGLYSLSSMVTVPSSRWPSETFTCNVAHPASKTKVDKPVPKRENGRVPRPPDCPKCPAPEMLGGPSVFIFPPKPKDTLLIARTPEVTCVVVDLDPEDPEVQISWFVDGKQMQTAKTQPREEQFNGTYRVVSVLPIGHQDWLKGKQFTCKVNNKALPSPIERTISKARGQAHQPSVYVLPPSREELSKNTVSLTCLIKDFFPPDIDVEWQSNGQQEPESKYRTTPPQLDEDGSYFLYSKLSVDKSRWQRGDTFICAVMHEALHNHYTQESLSHSPGK

SEQ ID NO: 56 - protein, 217 aa, Artificial Sequence
  Synthetic: Chimeric Clone I variable LC and canine ? light constant region  (Chimeric I LC)
DIVLTQSPSSLSASLGERVSLTCRASQEISGYLSWLQQKPDGTIKRLIYAASTLDSGVPKRFSGSRSGSDFSLTISSLESEDFADYYCLQYASYPWTFGGGAKLEIKRNDAQPAVYLFQPSPDQLHTGSASVVCLLNSFYPKDINVKWKVDGVIQDTGIQESVTEQDKDSTYSLSSTLTMSSTEYLSHELYSCEITHKSLPSTLIKSFQRSECQRVD

SEQ ID NO: 57 - protein, 470 aa, Artificial Sequence
  Synthetic: Chimeric Clone I variable HC and canine IgG-B with leader sequence
MAVLGLLLCLVTFPSCVLSEVQLQQSGPELVKPGASVKMSCKASGYTFTSYVMHWVKQKPGQGLEWIGYINPNNDGTFYNGKFKGKATLTSDKSSSTAYMELSSLTSEDSAVYYCAAFYYGFAYWGQGTLVTVSAASTTAPSVFPLAPSCGSTSGSTVALACLVSGYFPEPVTVSWNSGSLTSGVHTFPSVLQSSGLYSLSSMVTVPSSRWPSETFTCNVAHPASKTKVDKPVPKRENGRVPRPPDCPKCPAPEMLGGPSVFIFPPKPKDTLLIARTPEVTCVVVDLDPEDPEVQISWFVDGKQMQTAKTQPREEQFNGTYRVVSVLPIGHQDWLKGKQFTCKVNNKALPSPIERTISKARGQAHQPSVYVLPPSREELSKNTVSLTCLIKDFFPPDIDVEWQSNGQQEPESKYRTTPPQLDEDGSYFLYSKLSVDKSRWQRGDTFICAVMHEALHNHYTQESLSHSPGK

SEQ ID NO: 58 - protein, 237 aa, Artificial Sequence
  Synthetic: Chimeric Clone I variable LC and canine ? light constant region with leader sequence
METDTLLLWVLLLWVPGSTGDIVLTQSPSSLSASLGERVSLTCRASQEISGYLSWLQQKPDGTIKRLIYAASTLDSGVPKRFSGSRSGSDFSLTISSLESEDFADYYCLQYASYPWTFGGGAKLEIKRNDAQPAVYLFQPSPDQLHTGSASVVCLLNSFYPKDINVKWKVDGVIQDTGIQESVTEQDKDSTYSLSSTLTMSSTEYLSHELYSCEITHKSLPSTLIKSFQRSECQRVD

SEQ ID NO: 59 - protein, 116 aa, Artificial Sequence
  Synthetic: Caninized Clone B variable HC v1
EVQLVESGGDLVKPGGSLRLSCKASGYTFTSYVMHWVRQAPGQGLEWVAYINPKNDGTFYNGAVKGRFTISRDNARNTLYLQMNSLRSEDTAVYYCAAFNYGIAYWGQGTLVTVSS

SEQ ID NO: 60 - protein, 116 aa, Artificial Sequence
  Synthetic: Caninized Clone B variable HC v2
EVQLVQSGAEVKKPGASVKVSCKASGYTFTSYVMHWVRQAPGQGLEWMGYINPKNDGTFYNGKFQGRVTLTADTSTSTAYMELSSLRAGDIAVYYCAAFNYGIAYWGQGTLVTVSS

SEQ ID NO: 61 - protein, 107 aa, Artificial Sequence
  Synthetic: Caninized Clone B variable LC v1
EIVMTQSPASLSLSQEEKVTITCRASQEISGYLSWLQQKPGGTIKRLIYAASNRDTGVPSRFSGSGSGTDFSFTISSLEPEDVAVYYCVQYASYPWTFGGGAKLEIK

SEQ ID NO: 62 - protein, 107 aa, Artificial Sequence
  Synthetic: Caninized Clone B variable LC v2
DIVMTQTPLSLSVSPGETASISCRASQEISGYLSWLQQKPGGTIKRLIYAASNRDTGVPDRFSGSGSGTDFTLRISRVEADDTGVYYCVQYASYPWTFGGGTKVELK

SEQ ID NO: 63 - protein, 116 aa, Artificial Sequence
  Synthetic: Caninized Clone I variable HC v1
EVQLVESGGDLVKPGGSLRLSCKASGYTFTSYVMHWVRQAPGQGLEWVAYINPNNDGTFYNGAVKGRFTISRDNARNTLYLQMNSLRSEDTAVYYCAAFYYGFAYWGQGTLVTVSS

SEQ ID NO: 64 - protein, 116 aa, Artificial Sequence
  Synthetic: Caninized Clone I variable HC v2
EVQLVQSGAEVKKPGASVKVSCKASGYTFTSYVMHWVRQAPGQGLEWMGYINPNNDGTFYNGKFQGRVTLTADTSTSTAYMELSSLRAGDIAVYYCAAFYYGFAYWGQGTLVTVSS

SEQ ID NO: 65 - protein, 107 aa, Artificial Sequence
  Synthetic: Caninized Clone I variable LC v1
EIVMTQSPASLSLSQEEKVTITCRASQEISGYLSWLQQKPGGTIKRLIYAASNRDTGVPSRFSGSGSGTDFSFTISSLEPEDVAVYYCLQYASYPWTFGGGAKLEIK

SEQ ID NO: 66 - protein, 107 aa, Artificial Sequence
  Synthetic: Caninized Clone I variable LC v2
DIVMTQTPLSLSVSPGETASISCRASQEISGYLSWLQQKPGGTIKRLIYAASNRDTGVPDRFSGSGSGTDFTLRISRVEADDTGVYYCLQYASYPWTFGGGTKVELK

SEQ ID NO: 67 - protein, 116 aa, Artificial Sequence
  Synthetic: Felinized Clone B variable HC
QVLLVQSGAEVRKPGASVKIFCKASGYTFTSYVMHWLRQAPAQGLEWMGYINPKNDGTFYNGKFQGRLTLTADTSTNTAYMELSSLRSADTAVYYCAAFNYGIAYWGQGTLVTVSS

SEQ ID NO: 68 - protein, 107 aa, Artificial Sequence
  Synthetic: Felinized Clone B variable LC
DITMTQSPGSLAGSPGQQVTMNCRASQEISGYLSWLQQKPGGTIKRLIYAASTLDSGVPDRFSGSGSGTDFTLTISNLQAEDVASYYCVQYASYPWTFGGGTKLEIK

SEQ ID NO: 69 - protein, 116 aa, Artificial Sequence
  Synthetic: Felinized Clone I variable HC
QVLLVQSGAEVRKPGASVKIFCKASGYTFTSYVMHWLRQAPAQGLEWMGYINPNNDGTFYNGKFQGRLTLTADTSTNTAYMELSSLRSADTAVYYCAAFYYGFAYWGQGTLVTVSS

SEQ ID NO: 70 - protein, 107 aa, Artificial Sequence
  Synthetic: Felinized Clone I variable LC
DITMTQSPGSLAGSPGQQVTMNCRASQEISGYLSWLQQKPGGTIKRLIYAASTLDSGVPDRFSGSGSGTDFTLTISNLQAEDVASYYCLQYASYPWTFGGGTKLEIK

SEQ ID NO: 71 - protein, 451 aa, Artificial Sequence
  Synthetic: Caninized Clone B variable HC v1 and  variant canine IgG-B  C1q , CD16
EVQLVESGGDLVKPGGSLRLSCKASGYTFTSYVMHWVRQAPGQGLEWVAYINPKNDGTFYNGAVKGRFTISRDNARNTLYLQMNSLRSEDTAVYYCAAFNYGIAYWGQGTLVTVSSASTTAPSVFPLAPSCGSTSGSTVALACLVSGYFPEPVTVSWNSGSLTSGVHTFPSVLQSSGLYSLSSMVTVPSSRWPSETFTCNVAHPASKTKVDKPVPKRENGRVPRPPDCPKCPAPEPLGGPSVFIFPPKPKDTLLIARTPEVTCVVVDLDREDPEVQISWFVDGKQMQTAKTQPREEQFNGTYRVVSVLPIGHQDWLKGKQFTCRVNNKALPSPIERTISKARGQAHQPSVYVLPPSREELSKNTVSLTCLIKDFFPPDIDVEWQSNGQQEPESKYRTTPPQLDEDGSYFLYSKLSVDKSRWQRGDTFICAVMHEALHNHYTQESLSHSPGK

SEQ ID NO: 72 - protein, 451 aa, Artificial Sequence
  Synthetic: Caninized Clone B variable HC v2 and  variant canine IgG-B  C1q , CD16
EVQLVQSGAEVKKPGASVKVSCKASGYTFTSYVMHWVRQAPGQGLEWMGYINPKNDGTFYNGKFQGRVTLTADTSTSTAYMELSSLRAGDIAVYYCAAFNYGIAYWGQGTLVTVSSASTTAPSVFPLAPSCGSTSGSTVALACLVSGYFPEPVTVSWNSGSLTSGVHTFPSVLQSSGLYSLSSMVTVPSSRWPSETFTCNVAHPASKTKVDKPVPKRENGRVPRPPDCPKCPAPEPLGGPSVFIFPPKPKDTLLIARTPEVTCVVVDLDREDPEVQISWFVDGKQMQTAKTQPREEQFNGTYRVVSVLPIGHQDWLKGKQFTCRVNNKALPSPIERTISKARGQAHQPSVYVLPPSREELSKNTVSLTCLIKDFFPPDIDVEWQSNGQQEPESKYRTTPPQLDEDGSYFLYSKLSVDKSRWQRGDTFICAVMHEALHNHYTQESLSHSPGK

SEQ ID NO: 73 - protein, 217 aa, Artificial Sequence
  Synthetic: Caninized Clone B variable LC v1 and canine ? light constant region
EIVMTQSPASLSLSQEEKVTITCRASQEISGYLSWLQQKPGGTIKRLIYAASNRDTGVPSRFSGSGSGTDFSFTISSLEPEDVAVYYCVQYASYPWTFGGGAKLEIKRNDAQPAVYLFQPSPDQLHTGSASVVCLLNSFYPKDINVKWKVDGVIQDTGIQESVTEQDKDSTYSLSSTLTMSSTEYLSHELYSCEITHKSLPSTLIKSFQRSECQRVD

SEQ ID NO: 74 - protein, 217 aa, Artificial Sequence
  Synthetic: Caninized Clone B variable LC v2 and canine ? light constant region
DIVMTQTPLSLSVSPGETASISCRASQEISGYLSWLQQKPGGTIKRLIYAASNRDTGVPDRFSGSGSGTDFTLRISRVEADDTGVYYCVQYASYPWTFGGGTKVELKRNDAQPAVYLFQPSPDQLHTGSASVVCLLNSFYPKDINVKWKVDGVIQDTGIQESVTEQDKDSTYSLSSTLTMSSTEYLSHELYSCEITHKSLPSTLIKSFQRSECQRVD

SEQ ID NO: 75 - protein, 451 aa, Artificial Sequence
  Synthetic: Caninized Clone I variable HC v1 and  variant canine IgG-B  C1q , CD16
EVQLVESGGDLVKPGGSLRLSCKASGYTFTSYVMHWVRQAPGQGLEWVAYINPNNDGTFYNGAVKGRFTISRDNARNTLYLQMNSLRSEDTAVYYCAAFYYGFAYWGQGTLVTVSSASTTAPSVFPLAPSCGSTSGSTVALACLVSGYFPEPVTVSWNSGSLTSGVHTFPSVLQSSGLYSLSSMVTVPSSRWPSETFTCNVAHPASKTKVDKPVPKRENGRVPRPPDCPKCPAPEPLGGPSVFIFPPKPKDTLLIARTPEVTCVVVDLDREDPEVQISWFVDGKQMQTAKTQPREEQFNGTYRVVSVLPIGHQDWLKGKQFTCRVNNKALPSPIERTISKARGQAHQPSVYVLPPSREELSKNTVSLTCLIKDFFPPDIDVEWQSNGQQEPESKYRTTPPQLDEDGSYFLYSKLSVDKSRWQRGDTFICAVMHEALHNHYTQESLSHSPGK

SEQ ID NO: 76 - protein, 451 aa, Artificial Sequence
  Synthetic: Caninized Clone I variable HC v2 and  variant canine IgG-B  C1q , CD16
EVQLVQSGAEVKKPGASVKVSCKASGYTFTSYVMHWVRQAPGQGLEWMGYINPNNDGTFYNGKFQGRVTLTADTSTSTAYMELSSLRAGDIAVYYCAAFYYGFAYWGQGTLVTVSSASTTAPSVFPLAPSCGSTSGSTVALACLVSGYFPEPVTVSWNSGSLTSGVHTFPSVLQSSGLYSLSSMVTVPSSRWPSETFTCNVAHPASKTKVDKPVPKRENGRVPRPPDCPKCPAPEPLGGPSVFIFPPKPKDTLLIARTPEVTCVVVDLDREDPEVQISWFVDGKQMQTAKTQPREEQFNGTYRVVSVLPIGHQDWLKGKQFTCRVNNKALPSPIERTISKARGQAHQPSVYVLPPSREELSKNTVSLTCLIKDFFPPDIDVEWQSNGQQEPESKYRTTPPQLDEDGSYFLYSKLSVDKSRWQRGDTFICAVMHEALHNHYTQESLSHSPGK

SEQ ID NO: 77 - protein, 217 aa, Artificial Sequence
  Synthetic: Caninized Clone I variable LC v1 and canine ? light constant region
EIVMTQSPASLSLSQEEKVTITCRASQEISGYLSWLQQKPGGTIKRLIYAASNRDTGVPSRFSGSGSGTDFSFTISSLEPEDVAVYYCLQYASYPWTFGGGAKLEIKRNDAQPAVYLFQPSPDQLHTGSASVVCLLNSFYPKDINVKWKVDGVIQDTGIQESVTEQDKDSTYSLSSTLTMSSTEYLSHELYSCEITHKSLPSTLIKSFQRSECQRVD

SEQ ID NO: 78 - protein, 217 aa, Artificial Sequence
  Synthetic: Caninized Clone I variable LC v2 and canine ? light constant region
DIVMTQTPLSLSVSPGETASISCRASQEISGYLSWLQQKPGGTIKRLIYAASNRDTGVPDRFSGSGSGTDFTLRISRVEADDTGVYYCLQYASYPWTFGGGTKVELKRNDAQPAVYLFQPSPDQLHTGSASVVCLLNSFYPKDINVKWKVDGVIQDTGIQESVTEQDKDSTYSLSSTLTMSSTEYLSHELYSCEITHKSLPSTLIKSFQRSECQRVD

SEQ ID NO: 79 - protein, 451 aa, Artificial Sequence
  Synthetic: Felinized Clone B variable HC and variant feline IgG2 with hinge Cys modification
QVLLVQSGAEVRKPGASVKIFCKASGYTFTSYVMHWLRQAPAQGLEWMGYINPKNDGTFYNGKFQGRLTLTADTSTNTAYMELSSLRSADTAVYYCAAFNYGIAYWGQGTLVTVSSASTTASSVFPLAPSCGTTSGATVALACLVLGYFPEPVTVSWNSGALTSGVHTFPSVLQASGLYSLSSMVTVPSSRWLSDTFTCNVAHRPSSTKVDKTVPKTASTIESKTGECPKCPVPEIPGAPSVFIFPPKPKDTLSISRTPEVTCLVVDLGPDDSNVQITWFVDNTEMHTAKTRPREEQFNSTYRVVSVLPILHQDWLKGKEFKCKVNSKSLPSAMERTISKAKGQPHEPQVYVLPPTQEELSENKVSVTCLIKGFHPPDIAVEWEITGQPEPENNYQTTPPQLDSDGTYFLYSRLSVDRSHWQRGNTYTCSVSHEALHSHHTQKSLTQSPGK

SEQ ID NO: 80 - protein, 451 aa, Artificial Sequence
  Synthetic: Felinized Clone B variable HC and variant feline IgG2 with feline IgG1hinge
QVLLVQSGAEVRKPGASVKIFCKASGYTFTSYVMHWLRQAPAQGLEWMGYINPKNDGTFYNGKFQGRLTLTADTSTNTAYMELSSLRSADTAVYYCAAFNYGIAYWGQGTLVTVSSASTTASSVFPLAPSCGTTSGATVALACLVLGYFPEPVTVSWNSGALTSGVHTFPSVLQASGLYSLSSMVTVPSSRWLSDTFTCNVAHRPSSTKVDKTVRKTDHPPGPKPCDCPKCPPPEMLGGPSVFIFPPKPKDTLSISRTPEVTCLVVDLGPDDSNVQITWFVDNTEMHTAKTRPREEQFNSTYRVVSVLPILHQDWLKGKEFKCKVNSKSLPSAMERTISKAKGQPHEPQVYVLPPTQEELSENKVSVTCLIKGFHPPDIAVEWEITGQPEPENNYQTTPPQLDSDGTYFLYSRLSVDRSHWQRGNTYTCSVSHEALHSHHTQKSLTQSPGK

SEQ ID NO: 81 - protein, 217 aa, Artificial Sequence
  Synthetic: Felinized Clone B variable LC and feline  ? light constant region
DITMTQSPGSLAGSPGQQVTMNCRASQEISGYLSWLQQKPGGTIKRLIYAASTLDSGVPDRFSGSGSGTDFTLTISNLQAEDVASYYCVQYASYPWTFGGGTKLEIKRSDAQPSVFLFQPSLDELHTGSASIVCILNDFYPKEVNVKWKVDGVVQNKGIQESTTEQNSKDSTYSLSSTLTMSSTEYQSHEKFSCEVTHKSLASTLVKSFNRSECQRE

SEQ ID NO: 82 - protein, 451 aa, Artificial Sequence
  Synthetic: Felinized Clone I variable HC and variant feline IgG2 with hinge Cys modification
QVLLVQSGAEVRKPGASVKIFCKASGYTFTSYVMHWLRQAPAQGLEWMGYINPNNDGTFYNGKFQGRLTLTADTSTNTAYMELSSLRSADTAVYYCAAFYYGFAYWGQGTLVTVSSASTTASSVFPLAPSCGTTSGATVALACLVLGYFPEPVTVSWNSGALTSGVHTFPSVLQASGLYSLSSMVTVPSSRWLSDTFTCNVAHRPSSTKVDKTVPKTASTIESKTGECPKCPVPEIPGAPSVFIFPPKPKDTLSISRTPEVTCLVVDLGPDDSNVQITWFVDNTEMHTAKTRPREEQFNSTYRVVSVLPILHQDWLKGKEFKCKVNSKSLPSAMERTISKAKGQPHEPQVYVLPPTQEELSENKVSVTCLIKGFHPPDIAVEWEITGQPEPENNYQTTPPQLDSDGTYFLYSRLSVDRSHWQRGNTYTCSVSHEALHSHHTQKSLTQSPGK

SEQ ID NO: 83 - protein, 451 aa, Artificial Sequence
  Synthetic: Felinized Clone I variable HC and variant feline IgG2 with feline IgG1 hinge
QVLLVQSGAEVRKPGASVKIFCKASGYTFTSYVMHWLRQAPAQGLEWMGYINPNNDGTFYNGKFQGRLTLTADTSTNTAYMELSSLRSADTAVYYCAAFYYGFAYWGQGTLVTVSSASTTASSVFPLAPSCGTTSGATVALACLVLGYFPEPVTVSWNSGALTSGVHTFPSVLQASGLYSLSSMVTVPSSRWLSDTFTCNVAHRPSSTKVDKTVRKTDHPPGPKPCDCPKCPPPEMLGGPSVFIFPPKPKDTLSISRTPEVTCLVVDLGPDDSNVQITWFVDNTEMHTAKTRPREEQFNSTYRVVSVLPILHQDWLKGKEFKCKVNSKSLPSAMERTISKAKGQPHEPQVYVLPPTQEELSENKVSVTCLIKGFHPPDIAVEWEITGQPEPENNYQTTPPQLDSDGTYFLYSRLSVDRSHWQRGNTYTCSVSHEALHSHHTQKSLTQSPGK

SEQ ID NO: 84 - protein, 217 aa, Artificial Sequence
  Synthetic: Felinized Clone I variable LC and feline  ? light constant region
DITMTQSPGSLAGSPGQQVTMNCRASQEISGYLSWLQQKPGGTIKRLIYAASTLDSGVPDRFSGSGSGTDFTLTISNLQAEDVASYYCLQYASYPWTFGGGTKLEIKRSDAQPSVFLFQPSLDELHTGSASIVCILNDFYPKEVNVKWKVDGVVQNKGIQESTTEQNSKDSTYSLSSTLTMSSTEYQSHEKFSCEVTHKSLASTLVKSFNRSECQRE

SEQ ID NO: 85 - protein, 10 aa, Artificial Sequence
  Synthetic: IL4R epitope 1 (minimal sequence)
  misc_feature (2)..(2): X is D or N
  misc_feature (9)..(9): X is H or R
LXFMGSENXT

SEQ ID NO: 86 - protein, 20 aa, Artificial Sequence
  Synthetic: IL4R epitope 1 (expanded sequence)
  misc_feature (7)..(7): X is D or N
  misc_feature (14)..(14): X is H or R
RLSYQLXFMGSENXTCVPEN

SEQ ID NO: 87 - protein, 22 aa, Artificial Sequence
  Synthetic: IL4R epitope 2
  misc_feature (3)..(3): X is P or L
  misc_feature (4)..(4): X is I or M
  misc_feature (7)..(7): X is A or F
  misc_feature (16)..(16): X is D or H
  misc_feature (21)..(21): X is Q or T
SMXXDDXVEADVYQLXLWAGXQ

SEQ ID NO: 88 - protein, 10 aa, Artificial Sequence
  Synthetic: Canine IL4R epitope 1 (minimal sequence)
LDFMGSENHT

SEQ ID NO: 89 - protein, 20 aa, Artificial Sequence
  Synthetic: Canine IL4R epitope 1 (expanded sequence)
RLSYQLDFMGSENHTCVPEN

SEQ ID NO: 90 - protein, 22 aa, Artificial Sequence
  Synthetic: Canine IL4R epitope 2
SMPIDDAVEADVYQLDLWAGQQ

SEQ ID NO: 91 - protein, 10 aa, Artificial Sequence
  Synthetic: Feline IL4R epitope 1 (minimal sequence)
LNFMGSENRT

SEQ ID NO: 92 - protein, 20 aa, Artificial Sequence
  Synthetic: Feline IL4R epitope 1 (expanded sequence)
RLSYQLNFMGSENRTCVPEN

SEQ ID NO: 93 - protein, 22 aa, Artificial Sequence
  Synthetic: Feline IL4R epitope 2
SMLMDDFVEADVYQLHLWAGTQ

SEQ ID NO: 94 - protein, 823 aa, Canis lupus familiaris
  misc_feature (1)..(823): Canine IL4R
MGRLCSGLTFPVSCLVLVWVASSGSVKVLHEPSCFSDYISTSVCQWKMDHPTNCSAELRLSYQLDFMGSENHTCVPENREDSVCVCSMPIDDAVEADVYQLDLWAGQQLLWSGSFQPSKHVKPRTPGNLTVHPNISHTWLLMWTNPYPTENHLHSELTYMVNVSNDNDPEDFKVYNVTYMGPTLRLAASTLKSGASYSARVRAWAQTYNSTWSDWSPSTTWLNYYEPWEQHLPLGVSISCLVILAICLSCYFSIIKIKKGWWDQIPNPAHSPLVAIVIQDSQVSLWGKRSRGQEPAKCPHWKTCLTKLLPCLLEHGLGREEESPKTAKNGPLQGPGKPAWCPVEVSKTILWPESISVVQCVELSEAPVDNEEEEEVEEDKRSLCPSLEGSGGSFQEGREGIVARLTESLFLDLLGGENGGFCPQGLEESCLPPPSGSVGAQMPWAQFPRAGPRAAPEGPEQPRRPESALQASPTQSAGSSAFPEPPPVVTDNPAYRSFGSFLGQSSDPGDGDSDPELADRPGEADPGIPSAPQPPEPPAALQPEPESWEQILRQSVLQHRAAPAPGPGPGSGYREFTCAVKQGSAPDAGGPGFGPSGEAGYKAFCSLLPGGATCPGTSGGEAGSGEGGYKPFQSLTPGCPGAPTPVPVPLFTFGLDTEPPGSPQDSLGAGSSPEHLGVEPAGKEEDSRKTLLAPEQATDPLRDDLASSIVYSALTCHLCGHLKQWHDQEERGKAHIVPSPCCGCCCGDRSSLLLSPLRAPNVLPGGVLLEASLSPASLVPSGVSKEGKSSPFSQPASSSAQSSSQTPKKLAVLSTEPTCMSAS

SEQ ID NO: 95 - protein, 818 aa, Felis catus
  misc_feature (1)..(818): Feline IL4R
MGRLCSGLTFPVSCLILMWAAGSGSVKVLRAPTCFSDYFSTSVCQWNMDAPTNCSAELRLSYQLNFMGSENRTCVPENGEGAACACSMLMDDFVEADVYQLHLWAGTQLLWSGSFKPSSHVKPRAPGNLTVHPNVSHTWLLRWSNPYPPENHLHAELTYMVNISSEDDPTDSRIYNVTYMGPTLRVAASTLTSGASYSARVRAWAQSYNSTWSEWSPSTKWLNHYEPWEQHLPLGVSISCLVILAVCLSCYLSVIKIKKEWWDQIPNPAHSHLVAIVIQDPQVSLWGKRSRGQEPAKCSHWKTCLRKLLPCLLEHGMERKEDPSKIARNGPSQGSGKSAWCPVEVSKTILWPESISVVRCVELLEAPVESEEEEEEEEEDKGSFCPSPVNLEDSFQEGREGIAARLTESLFMDLLGVEKGGFGPQGSLESWFPPPSGSAGAQMPWAEFPGPGPQEASPQGKEQPFDPRSDPLATLPQSPASPTFPETPPVVTDNPAYRSFGTFQGRSSGPGECDSGPELAGRLGEADPGIPAAPQPSEPPSALQPEAETWEQILRQRVLQHRGAPAPAPGSGYREFVCAVRQGSTQDSRVGDFGPSEEAGYKAFSSLLTSGAVCPETSGGEAGSGDGGYKPFQSLTPGCPGAPAPVPVPLFTFGLDAEPPHCPQDSPLPGSSPEPAGKAQDSHKTPPAPEQAADPLRDDLASGIVYSALTCHLCGHLKQCHGQEEGGEAHPVASPCCGCCCGDRSSPLVSPLRAPDPLPGGVPLEASLSPASPAPLAVSEEGPPSLCFQPALSHAHSSSQTPKKVAMLSPEPTCTMAS

SEQ ID NO: 96 - protein, 809 aa, Equus caballus
  misc_feature (1)..(809): Equine IL4R
MGCLCPGLTLPVSCLILVWAAGSGSVKVLRLTACFSDYISASTCEWKMDRPTNCSAQLRLSYQLNDEFSDNLTCIPENREDEVCVCRMLMDNIVSEDVYELDLWAGNQLLWNSSFKPSRHVKPRAPQNLTVHAISHTWLLTWSNPYPLKNHLWSELTYLVNISKEDDPTDFKIYNVTYMDPTLRVTASTLKSRATYSARVKARAQNYNSTWSEWSPSTTWHNYYEQPLEQRLPLGVSISCVVILAICLSCYFSIIKIKKEWWDQIPNPAHSPLVAIVLQDSQVSLWGKQSRGQEPAKCPRWKTCLTKLLPCLLEHGLQKEEDSSKTVRNGPFQSPGKSAWHTVEVNHTILRPEIISVVPCVELCEAQVESEEEEVEEDRGSFCPSPESSGSGFQEGREGVAARLTESLFLGLLGAENGALGESCLLPPLGSAHMPWARISSAGPQEAASQGEEQPLNPESNPLATLTQSPGSLAFTEAPAVVADNPAYRSFSNSLSQPRGPGELDSDPQLAEHLGQVDPSIPSAPQPSEPPTALQPEPETWEQMLRQSVLQQGAAPAPASAPTGGYREFAQVVKQGGGAAGSGPSGEAGYKAFSSLLAGSAVCPGQSGVEASSGEGGYRPYESPDPGAPAPVPVPLFTFGLDVEPPHSPQNSLLPGGSPELPGPEPTVKGEDPRKPLLSAQQATDSLRDDLGSGIVYSALTCHLCGHLKQCHGQEEHGEAHTVASPCCGCCCGDRSSPPVSPVRALDPPPGGVPLEAGLSLASLGSLGLSEERKPSLFFQPAPGNAQSSSQTPLTVAMLSTGPTCTSAS

SEQ ID NO: 97 - protein, 810 aa, Mus musculus
  misc_feature (1)..(810): Murine IL4R
MGRLCTKFLTSVGCLILLLVTGSGSIKVLGEPTCFSDYIRTSTCEWFLDSAVDCSSQLCLHYRLMFFEFSENLTCIPRNSASTVCVCHMEMNRPVQSDRYQMELWAEHRQLWQGSFSPSGNVKPLAPDNLTLHTNVSDEWLLTWNNLYPSNNLLYKDLISMVNISREDNPAEFIVYNVTYKEPRLSFPINILMSGVYYTARVRVRSQILTGTWSEWSPSITWYNHFQLPLIQRLPLGVTISCLCIPLFCLFCYFSITKIKKIWWDQIPTPARSPLVAIIIQDAQVPLWDKQTRSQESTKYPHWKTCLDKLLPCLLKHRVKKKTDFPKAAPTKSLQSPGKAGWCPMEVSRTVLWPENVSVSVVRCMELFEAPVQNVEEEEDEIVKEDLSMSPENSGGCGFQESQADIMARLTENLFSDLLEAENGGLGQSALAESCSPLPSGSGQASVSWACLPMGPSEEATCQVTEQPSHPGPLSGSPAQSAPTLACTQVPLVLADNPAYRSFSDCCSPAPNPGELAPEQQQADHLEEEEPPSPADPHSSGPPMQPVESWEQILHMSVLQHGAAAGSTPAPAGGYQEFVQAVKQGAAQDPGVPGVRPSGDPGYKAFSSLLSSNGIRGDTAAAGTDDGHGGYKPFQNPVPNQSPSSVPLFTFGLDTELSPSPLNSDPPKSPPECLGLELGLKGGDWVKAPPPADQVPKPFGDDLGFGIVYSSLTCHLCGHLKQHHSQEEGGQSPIVASPGCGCCYDDRSPSLGSLSGALESCPEGIPPEANLMSAPKTPSNLSGEGKGPGHSPVPSQTTEVPVGALGIAVS

SEQ ID NO: 98 - protein, 825 aa, Homo sapiens
  misc_feature (1)..(825): Human IL4R
MGWLCSGLLFPVSCLVLLQVASSGNMKVLQEPTCVSDYMSISTCEWKMNGPTNCSTELRLLYQLVFLLSEAHTCIPENNGGAGCVCHLLMDDVVSADNYTLDLWAGQQLLWKGSFKPSEHVKPRAPGNLTVHTNVSDTLLLTWSNPYPPDNYLYNHLTYAVNIWSENDPADFRIYNVTYLEPSLRIAASTLKSGISYRARVRAWAQCYNTTWSEWSPSTKWHNSYREPFEQHLLLGVSVSCIVILAVCLLCYVSITKIKKEWWDQIPNPARSRLVAIIIQDAQGSQWEKRSRGQEPAKCPHWKNCLTKLLPCFLEHNMKRDEDPHKAAKEMPFQGSGKSAWCPVEISKTVLWPESISVVRCVELFEAPVECEEEEEVEEEKGSFCASPESSRDDFQEGREGIVARLTESLFLDLLGEENGGFCQQDMGESCLLPPSGSTSAHMPWDEFPSAGPKEAPPWGKEQPLHLEPSPPASPTQSPDNLTCTETPLVIAGNPAYRSFSNSLSQSPCPRELGPDPLLARHLEEVEPEMPCVPQLSEPTTVPQPEPETWEQILRRNVLQHGAAAAPVSAPTSGYQEFVHAVEQGGTQASAVVGLGPPGEAGYKAFSSLLASSAVSPEKCGFGASSGEEGYKPFQDLIPGCPGDPAPVPVPLFTFGLDREPPRSPQSSHLPSSSPEHLGLEPGEKVEDMPKPPLPQEQATDPLVDSLGSGIVYSALTCHLCGHLKQCHGQEDGGQTPVMASPCCGCCCGDRSSPPTTPLRAPDPSPGGVPLEASLCPASLAPSGISEKSKSSSSFHPAPGNAQSSSQTPKIVNFVSVGPTYMRVS

SEQ ID NO: 99 - protein, 203 aa, Artificial Sequence
  Synthetic: Canine IL4R_ECD
GSVKVLHEPSCFSDYISTSVCQWKMDHPTNCSAELRLSYQLDFMGSENHTCVPENREDSVCVCSMPIDDAVEADVYQLDLWAGQQLLWSGSFQPSKHVKPRTPGNLTVHPNISHTWLLMWTNPYPTENHLHSELTYMVNVSNDNDPEDFKVYNVTYMGPTLRLAASTLKSGASYSARVRAWAQTYNSTWSDWSPSTTWLNYYE

SEQ ID NO: 100 - protein, 203 aa, Artificial Sequence
  Synthetic: Feline IL4R_ECD
GSVKVLRAPTCFSDYFSTSVCQWNMDAPTNCSAELRLSYQLNFMGSENRTCVPENGEGAACACSMLMDDFVEADVYQLHLWAGTQLLWSGSFKPSSHVKPRAPGNLTVHPNVSHTWLLRWSNPYPPENHLHAELTYMVNISSEDDPTDSRIYNVTYMGPTLRVAASTLTSGASYSARVRAWAQSYNSTWSEWSPSTKWLNHYE

SEQ ID NO: 101 - protein, 206 aa, Artificial Sequence
  Synthetic: Equine IL4R_ECD
VKVLRLTACFSDYISASTCEWKMDRPTNCSAQLRLSYQLNDEFSDNLTCIPENREDEVCVCRMLMDNIVSEDVYELDLWAGNQLLWNSSFKPSRHVKPRAPQNLTVHAISHTWLLTWSNPYPLKNHLWSELTYLVNISKEDDPTDFKIYNVTYMDPTLRVTASTLKSRATYSARVKARAQNYNSTWSEWSPSTTWHNYYEQPLEQR

SEQ ID NO: 102 - protein, 238 aa, Artificial Sequence
  Synthetic: Murine IL4R_ECD
IKVLGEPTCFSDYIRTSTCEWFLDSAVDCSSQLCLHYRLMFFEFSENLTCIPRNSASTVCVCHMEMNRPVQSDRYQMELWAEHRQLWQGSFSPSGNVKPLAPDNLTLHTNVSDEWLLTWNNLYPSNNLLYKDLISMVNISREDNPAEFIVYNVTYKEPRLSFPINILMSGVYYTARVRVRSQILTGTWSEWSPSITWYNHFQLPLIQRLPLGVTISCLCIPLFCLFCYFSITKIKKIW

SEQ ID NO: 103 - protein, 209 aa, Artificial Sequence
  Synthetic: Human IL4R_ECD
GNMKVLQEPTCVSDYMSISTCEWKMNGPTNCSTELRLLYQLVFLLSEAHTCIPENNGGAGCVCHLLMDDVVSADNYTLDLWAGQQLLWKGSFKPSEHVKPRAPGNLTVHTNVSDTLLLTWSNPYPPDNYLYNHLTYAVNIWSENDPADFRIYNVTYLEPSLRIAASTLKSGISYRARVRAWAQCYNTTWSEWSPSTKWHNSYREPFEQH

SEQ ID NO: 104 - protein, 835 aa, Artificial Sequence
  Synthetic: Canine IL4R_C-FLAG with leader
MGRLCSGLTFPVSCLVLVWVASSGSVKVLHEPSCFSDYISTSVCQWKMDHPTNCSAELRLSYQLDFMGSENHTCVPENREDSVCVCSMPIDDAVEADVYQLDLWAGQQLLWSGSFQPSKHVKPRTPGNLTVHPNISHTWLLMWTNPYPTENHLHSELTYMVNVSNDNDPEDFKVYNVTYMGPTLRLAASTLKSGASYSARVRAWAQTYNSTWSDWSPSTTWLNYYEPWEQHLPLGVSISCLVILAICLSCYFSIIKIKKGWWDQIPNPAHSPLVAIVIQDSQVSLWGKRSRGQEPAKCPHWKTCLTKLLPCLLEHGLGREEESPKTAKNGPLQGPGKPAWCPVEVSKTILWPESISVVQCVELSEAPVDNEEEEEVEEDKRSLCPSLEGSGGSFQEGREGIVARLTESLFLDLLGGENGGFCPQGLEESCLPPPSGSVGAQMPWAQFPRAGPRAAPEGPEQPRRPESALQASPTQSAGSSAFPEPPPVVTDNPAYRSFGSFLGQSSDPGDGDSDPELADRPGEADPGIPSAPQPPEPPAALQPEPESWEQILRQSVLQHRAAPAPGPGPGSGYREFTCAVKQGSAPDAGGPGFGPSGEAGYKAFCSLLPGGATCPGTSGGEAGSGEGGYKPFQSLTPGCPGAPTPVPVPLFTFGLDTEPPGSPQDSLGAGSSPEHLGVEPAGKEEDSRKTLLAPEQATDPLRDDLASSIVYSALTCHLCGHLKQWHDQEERGKAHIVPSPCCGCCCGDRSSLLLSPLRAPNVLPGGVLLEASLSPASLVPSGVSKEGKSSPFSQPASSSAQSSSQTPKKLAVLSTEPTCMSASGSGSDYKDDDDK

SEQ ID NO: 105 - protein, 812 aa, Artificial Sequence
  Synthetic: Canine IL4R_C-FLAG
GSVKVLHEPSCFSDYISTSVCQWKMDHPTNCSAELRLSYQLDFMGSENHTCVPENREDSVCVCSMPIDDAVEADVYQLDLWAGQQLLWSGSFQPSKHVKPRTPGNLTVHPNISHTWLLMWTNPYPTENHLHSELTYMVNVSNDNDPEDFKVYNVTYMGPTLRLAASTLKSGASYSARVRAWAQTYNSTWSDWSPSTTWLNYYEPWEQHLPLGVSISCLVILAICLSCYFSIIKIKKGWWDQIPNPAHSPLVAIVIQDSQVSLWGKRSRGQEPAKCPHWKTCLTKLLPCLLEHGLGREEESPKTAKNGPLQGPGKPAWCPVEVSKTILWPESISVVQCVELSEAPVDNEEEEEVEEDKRSLCPSLEGSGGSFQEGREGIVARLTESLFLDLLGGENGGFCPQGLEESCLPPPSGSVGAQMPWAQFPRAGPRAAPEGPEQPRRPESALQASPTQSAGSSAFPEPPPVVTDNPAYRSFGSFLGQSSDPGDGDSDPELADRPGEADPGIPSAPQPPEPPAALQPEPESWEQILRQSVLQHRAAPAPGPGPGSGYREFTCAVKQGSAPDAGGPGFGPSGEAGYKAFCSLLPGGATCPGTSGGEAGSGEGGYKPFQSLTPGCPGAPTPVPVPLFTFGLDTEPPGSPQDSLGAGSSPEHLGVEPAGKEEDSRKTLLAPEQATDPLRDDLASSIVYSALTCHLCGHLKQWHDQEERGKAHIVPSPCCGCCCGDRSSLLLSPLRAPNVLPGGVLLEASLSPASLVPSGVSKEGKSSPFSQPASSSAQSSSQTPKKLAVLSTEPTCMSASGSGSDYKDDDDK

SEQ ID NO: 106 - protein, 237 aa, Artificial Sequence
  Synthetic: Canine IL4R-ECD_C-His6 with leader
MDMRVPAQLLGLLLLWLRGARCSGSVKVLHEPSCFSDYISTSVCQWKMDHPTNCSAELRLSYQLDFMGSENHTCVPENREDSVCVCSMPIDDAVEADVYQLDLWAGQQLLWSGSFQPSKHVKPRTPGNLTVHPNISHTWLLMWTNPYPTENHLHSELTYMVNVSNDNDPEDFKVYNVTYMGPTLRLAASTLKSGASYSARVRAWAQTYNSTWSDWSPSTTWLNYYEPGSGSHHHHHH

SEQ ID NO: 107 - protein, 214 aa, Artificial Sequence
  Synthetic: Canine IL4R-ECD_C-His6
GSVKVLHEPSCFSDYISTSVCQWKMDHPTNCSAELRLSYQLDFMGSENHTCVPENREDSVCVCSMPIDDAVEADVYQLDLWAGQQLLWSGSFQPSKHVKPRTPGNLTVHPNISHTWLLMWTNPYPTENHLHSELTYMVNVSNDNDPEDFKVYNVTYMGPTLRLAASTLKSGASYSARVRAWAQTYNSTWSDWSPSTTWLNYYEPGSGSHHHHHH

SEQ ID NO: 108 - protein, 473 aa, Artificial Sequence
  Synthetic: Canine IL4R-ECD_ C HuFc_His6 with leader
MDMRVPAQLLGLLLLWLRGARCSGSVKVLHEPSCFSDYISTSVCQWKMDHPTNCSAELRLSYQLDFMGSENHTCVPENREDSVCVCSMPIDDAVEADVYQLDLWAGQQLLWSGSFQPSKHVKPRTPGNLTVHPNISHTWLLMWTNPYPTENHLHSELTYMVNVSNDNDPEDFKVYNVTYMGPTLRLAASTLKSGASYSARVRAWAQTYNSTWSDWSPSTTWLNYYEPGSENLYFQGPKSCDKTHTCPPCPAPELLGGPSVFLFPPKPKDTLMISRTPEVTCVVVDVSHEDPEVKFNWYVDGVEVHNAKTKPREEQYNSTYRVVSVLTVLHQDWLNGKEYKCKVSNKALPAPIEKTISKAKGQPREPQVYTLPPSRDELTKNQVSLTCLVKGFYPSDIAVEWESNGQPENNYKTTPPVLDSDGSFFLYSKLTVDKSRWQQGNVFSCSVMHEALHNHYTQKSLSLSPGKHHHHHH

SEQ ID NO: 109 - protein, 450 aa, Artificial Sequence
  Synthetic: Canine IL4R-ECD_ C HuFc_His6
GSVKVLHEPSCFSDYISTSVCQWKMDHPTNCSAELRLSYQLDFMGSENHTCVPENREDSVCVCSMPIDDAVEADVYQLDLWAGQQLLWSGSFQPSKHVKPRTPGNLTVHPNISHTWLLMWTNPYPTENHLHSELTYMVNVSNDNDPEDFKVYNVTYMGPTLRLAASTLKSGASYSARVRAWAQTYNSTWSDWSPSTTWLNYYEPGSENLYFQGPKSCDKTHTCPPCPAPELLGGPSVFLFPPKPKDTLMISRTPEVTCVVVDVSHEDPEVKFNWYVDGVEVHNAKTKPREEQYNSTYRVVSVLTVLHQDWLNGKEYKCKVSNKALPAPIEKTISKAKGQPREPQVYTLPPSRDELTKNQVSLTCLVKGFYPSDIAVEWESNGQPENNYKTTPPVLDSDGSFFLYSKLTVDKSRWQQGNVFSCSVMHEALHNHYTQKSLSLSPGKHHHHHH

SEQ ID NO: 110 - protein, 471 aa, Artificial Sequence
  Synthetic: Feline IL4R-ECD_ C HuFc_His6 with leader
MDMRVPAQLLGLLLLWLRGARCGSVKVLRAPTCFSDYFSTSVCQWNMDAPTNCSAELRLSYQLNFMGSENRTCVPENGEGAACACSMLMDDFVEADVYQLHLWAGTQLLWSGSFKPSSHVKPRAPGNLTVHPNVSHTWLLRWSNPYPPENHLHAELTYMVNISSEDDPTDSRIYNVTYMGPTLRVAASTLTSGASYSARVRAWAQSYNSTWSDWSPSTTWLNYYEGSENLYFQGPKSCDKTHTCPPCPAPELLGGPSVFLFPPKPKDTLMISRTPEVTCVVVDVSHEDPEVKFNWYVDGVEVHNAKTKPREEQYNSTYRVVSVLTVLHQDWLNGKEYKCKVSNKALPAPIEKTISKAKGQPREPQVYTLPPSRDELTKNQVSLTCLVKGFYPSDIAVEWESNGQPENNYKTTPPVLDSDGSFFLYSKLTVDKSRWQQGNVFSCSVMHEALHNHYTQKSLSLSPGKHHHHHH

SEQ ID NO: 111 - protein, 449 aa, Artificial Sequence
  Synthetic: Feline IL4R-ECD_ C HuFc_His6
GSVKVLRAPTCFSDYFSTSVCQWNMDAPTNCSAELRLSYQLNFMGSENRTCVPENGEGAACACSMLMDDFVEADVYQLHLWAGTQLLWSGSFKPSSHVKPRAPGNLTVHPNVSHTWLLRWSNPYPPENHLHAELTYMVNISSEDDPTDSRIYNVTYMGPTLRVAASTLTSGASYSARVRAWAQSYNSTWSDWSPSTTWLNYYEGSENLYFQGPKSCDKTHTCPPCPAPELLGGPSVFLFPPKPKDTLMISRTPEVTCVVVDVSHEDPEVKFNWYVDGVEVHNAKTKPREEQYNSTYRVVSVLTVLHQDWLNGKEYKCKVSNKALPAPIEKTISKAKGQPREPQVYTLPPSRDELTKNQVSLTCLVKGFYPSDIAVEWESNGQPENNYKTTPPVLDSDGSFFLYSKLTVDKSRWQQGNVFSCSVMHEALHNHYTQKSLSLSPGKHHHHHH

SEQ ID NO: 112 - protein, 482 aa, Artificial Sequence
  Synthetic: Equine IL4R-ECD_ C HuFc_His6 with leader
MPSSVSWGILLLAGLCCLVPVSLAVKVLRLTACFSDYISASTCEWKMDRPTNCSAQLRLSYQLNDEFSDNLTCIPENREDEVCVCRMLMDNIVSEDVYELDLWAGNQLLWNSSFKPSRHVKPRAPQNLTVHAISHTWLLTWSNPYPLKNHLWSELTYLVNISKEDDPTDFKIYNVTYMDPTLRVTASTLKSRATYSARVKARAQNYNSTWSEWSPSTTWHNYYEQPLEQRGGGSGGGSENLYFQGPKSCDKTHTCPPCPAPELLGGPSVFLFPPKPKDTLMISRTPEVTCVVVDVSHEDPEVKFNWYVDGVEVHNAKTKPREEQYNSTYRVVSVLTVLHQDWLNGKEYKCKVSNKALPAPIEKTISKAKGQPREPQVYTLPPSRDELTKNQVSLTCLVKGFYPSDIAVEWESNGQPENNYKTTPPVLDSDGSFFLYSKLTVDKSRWQQGNVFSCSVMHEALHNHYTQKSLSLSPGKHHHHHH

SEQ ID NO: 113 - protein, 458 aa, Artificial Sequence
  Synthetic: Equine IL4R-ECD_ C HuFc_His6
VKVLRLTACFSDYISASTCEWKMDRPTNCSAQLRLSYQLNDEFSDNLTCIPENREDEVCVCRMLMDNIVSEDVYELDLWAGNQLLWNSSFKPSRHVKPRAPQNLTVHAISHTWLLTWSNPYPLKNHLWSELTYLVNISKEDDPTDFKIYNVTYMDPTLRVTASTLKSRATYSARVKARAQNYNSTWSEWSPSTTWHNYYEQPLEQRGGGSGGGSENLYFQGPKSCDKTHTCPPCPAPELLGGPSVFLFPPKPKDTLMISRTPEVTCVVVDVSHEDPEVKFNWYVDGVEVHNAKTKPREEQYNSTYRVVSVLTVLHQDWLNGKEYKCKVSNKALPAPIEKTISKAKGQPREPQVYTLPPSRDELTKNQVSLTCLVKGFYPSDIAVEWESNGQPENNYKTTPPVLDSDGSFFLYSKLTVDKSRWQQGNVFSCSVMHEALHNHYTQKSLSLSPGKHHHHHH

SEQ ID NO: 114 - protein, 507 aa, Artificial Sequence
  Synthetic: Murine IL4R-ECD_ C HuFc_His6 with leader
MGWLCSGLLFPVSCLVLLQVASSIKVLGEPTCFSDYIRTSTCEWFLDSAVDCSSQLCLHYRLMFFEFSENLTCIPRNSASTVCVCHMEMNRPVQSDRYQMELWAEHRQLWQGSFSPSGNVKPLAPDNLTLHTNVSDEWLLTWNNLYPSNNLLYKDLISMVNISREDNPAEFIVYNVTYKEPRLSFPINILMSGVYYTARVRVRSQILTGTWSEWSPSITWYNHFQLPLIQRLPLGVTISCLCIPLFCLFCYFSITKIKKIWGSENLYFQGPKSCDKTHTCPPCPAPELLGGPSVFLFPPKPKDTLMISRTPEVTCVVVDVSHEDPEVKFNWYVDGVEVHNAKTKPREEQYNSTYRVVSVLTVLHQDWLNGKEYKCKVSNKALPAPIEKTISKAKGQPREPQVYTLPPSRDELTKNQVSLTCLVKGFYPSDIAVEWESNGQPENNYKTTPPVLDSDGSFFLYSKLTVDKSRWQQGNVFSCSVMHEALHNHYTQKSLSLSPGKHHHHHH

SEQ ID NO: 115 - protein, 484 aa, Artificial Sequence
  Synthetic: Murine IL4R-ECD_ C HuFc_His6
IKVLGEPTCFSDYIRTSTCEWFLDSAVDCSSQLCLHYRLMFFEFSENLTCIPRNSASTVCVCHMEMNRPVQSDRYQMELWAEHRQLWQGSFSPSGNVKPLAPDNLTLHTNVSDEWLLTWNNLYPSNNLLYKDLISMVNISREDNPAEFIVYNVTYKEPRLSFPINILMSGVYYTARVRVRSQILTGTWSEWSPSITWYNHFQLPLIQRLPLGVTISCLCIPLFCLFCYFSITKIKKIWGSENLYFQGPKSCDKTHTCPPCPAPELLGGPSVFLFPPKPKDTLMISRTPEVTCVVVDVSHEDPEVKFNWYVDGVEVHNAKTKPREEQYNSTYRVVSVLTVLHQDWLNGKEYKCKVSNKALPAPIEKTISKAKGQPREPQVYTLPPSRDELTKNQVSLTCLVKGFYPSDIAVEWESNGQPENNYKTTPPVLDSDGSFFLYSKLTVDKSRWQQGNVFSCSVMHEALHNHYTQKSLSLSPGKHHHHHH

SEQ ID NO: 116 - protein, 478 aa, Artificial Sequence
  Synthetic: Human IL4R-ECD_ C HuFc_His6  with leader
MGWLCSGLLFPVSCLVLLQVASSGNMKVLQEPTCVSDYMSISTCEWKMNGPTNCSTELRLLYQLVFLLSEAHTCIPENNGGAGCVCHLLMDDVVSADNYTLDLWAGQQLLWKGSFKPSEHVKPRAPGNLTVHTNVSDTLLLTWSNPYPPDNYLYNHLTYAVNIWSENDPADFRIYNVTYLEPSLRIAASTLKSGISYRARVRAWAQCYNTTWSEWSPSTKWHNSYREPFEQHGSENLYFQGPKSCDKTHTCPPCPAPELLGGPSVFLFPPKPKDTLMISRTPEVTCVVVDVSHEDPEVKFNWYVDGVEVHNAKTKPREEQYNSTYRVVSVLTVLHQDWLNGKEYKCKVSNKALPAPIEKTISKAKGQPREPQVYTLPPSRDELTKNQVSLTCLVKGFYPSDIAVEWESNGQPENNYKTTPPVLDSDGSFFLYSKLTVDKSRWQQGNVFSCSVMHEALHNHYTQKSLSLSPGKHHHHHH

SEQ ID NO: 117 - protein, 455 aa, Artificial Sequence
  Synthetic: Human IL4R-ECD_ C HuFc_His6
GNMKVLQEPTCVSDYMSISTCEWKMNGPTNCSTELRLLYQLVFLLSEAHTCIPENNGGAGCVCHLLMDDVVSADNYTLDLWAGQQLLWKGSFKPSEHVKPRAPGNLTVHTNVSDTLLLTWSNPYPPDNYLYNHLTYAVNIWSENDPADFRIYNVTYLEPSLRIAASTLKSGISYRARVRAWAQCYNTTWSEWSPSTKWHNSYREPFEQHGSENLYFQGPKSCDKTHTCPPCPAPELLGGPSVFLFPPKPKDTLMISRTPEVTCVVVDVSHEDPEVKFNWYVDGVEVHNAKTKPREEQYNSTYRVVSVLTVLHQDWLNGKEYKCKVSNKALPAPIEKTISKAKGQPREPQVYTLPPSRDELTKNQVSLTCLVKGFYPSDIAVEWESNGQPENNYKTTPPVLDSDGSFFLYSKLTVDKSRWQQGNVFSCSVMHEALHNHYTQKSLSLSPGKHHHHHH

SEQ ID NO: 118 - protein, 132 aa, Canis lupus familiaris
  misc_feature (1)..(132): Canine IL4 precursor
MGLTSQLIPTLVCLLALTSTFVHGHNFNITIKEIIKMLNILTARNDSCMELTVKDVFTAPKNTSDKEIFCRAATVLRQIYTHNCSNRYLRGLYRNLSSMANKTCSMNEIKKSTLKDFLERLKVIMQKKYYRH

SEQ ID NO: 119 - protein, 133 aa, Felis silvestris catus
  misc_feature (1)..(133): Feline IL4 precursor
MGLTYQLIPALVCLLAFTSTFVHGQNFNNTLKEIIKTLNILTARNDSCMELTVMDVLAAPKNTSDKEIFCRATTVLRQIYTHHNCSTKFLKGLDRNLSSMANRTCSVNEVKKCTLKDFLERLKAIMQKKYSKH

SEQ ID NO: 120 - protein, 137 aa, Equus caballus
  misc_feature (1)..(137): Equine IL4 precursor
MGLTYQLIPALVCLLACTSNFIQGCKYDITLQEIIKTLNNLTDGKGKNSCMELTVADAFAGPKNTDGKEICRAAKVLQQLYKRHDRSLIKECLSGLDRNLKGMANGTCCTVNEAKKSTLKDFLERLKTIMKEKYSKC

SEQ ID NO: 121 - protein, 132 aa, Canis lupus familiaris; identical to SEQ ID NO: 118
  misc_feature (1)..(132): Canine IL4 precursor

SEQ ID NO: 122 - protein, 133 aa, Felis catus
  misc_feature (1)..(133): Feline IL4 precursor
MDLTSQLIPALVCLLAFTSTFVHGQNFNNTLKEIIKTLNILTARNDSCMELTVMDVLAAPKNTSDKEIFCRATTVLRQIYTHHNCSTKFLKGLDRNLSSMANRTCSVNEVKKCTLKDFLERLKAIMQKKYSKH

SEQ ID NO: 123 - protein, 139 aa, Equus przewalskii
  misc_feature (1)..(139): Predicted Equine IL4 precursor
MGLISQLIPALVCLLACTSNFIQGCKYDITLQEIIKTLNNLTDGKGKNSCMELTVADAFAGPKNTDGKEICRAAKVLQQLYKRHDRSLIKECLSGLDRNLKGMANGTCCTVNEAKKSTLKDFLERLKTIMKEKYSKCQS

SEQ ID NO: 124 - protein, 151 aa, Artificial Sequence
  Synthetic: Canine IL4_N-His6 with leader
MGLTSQLIPTLVCLLALTSTFVHGSSHHHHHHSSGLVPRGSHMHNFNITIKEIIKMLNILTARNDSCMELTVKDVFTAPKNTSDKEIFCRAATVLRQIYTHNCSNRYLRGLYRNLSSMANKTCSMNEIKKSTLKDFLERLKVIMQKKYYRH

SEQ ID NO: 125 - protein, 126 aa, Artificial Sequence
  Synthetic: Canine IL4_N-His6
SHHHHHHSSGLVPRGSHMHNFNITIKEIIKMLNILTARNDSCMELTVKDVFTAPKNTSDKEIFCRAATVLRQIYTHNCSNRYLRGLYRNLSSMANKTCSMNEIKKSTLKDFLERLKVIMQKKYYRH

SEQ ID NO: 126 - protein, 137 aa, Artificial Sequence
  Synthetic: Canine IL4_C-His6 with leader
MGLTSQLIPTLVCLLALTSTFVHGHNFNITIKEIIKMLNILTARNDSCMELTVKDVFTAPKNTSDKEIFCRAATVLRQIYTHNCSNRYLRGLYRNLSSMANKTCSMNEIKKSTLKDFLERLKVIMQKKYYRHHHHHH

SEQ ID NO: 127 - protein, 117 aa, Artificial Sequence
  Synthetic: Canine IL4_C-His6
HNFNITIKEIIKMLNILTARNDSCMELTVKDVFTAPKNTSDKEIFCRAATVLRQIYTHNCSNRYLRGLYRNLSSMANKTCSMNEIKKSTLKDFLERLKVIMQKKYYRGSGSHHHHHH

SEQ ID NO: 128 - protein, 143 aa, Artificial Sequence
  Synthetic: Feline IL4_C-His6 with leader
MDLTSQLIPALVCLLAFTSTFVHGQNFNNTLKEIIKTLNILTARNDSCMELTVMDVLAAPKNTSDKEIFCRATTVLRQIYTHHNCSTKFLKGLDRNLSSMANRTCSVNEVKKCTLKDFLERLKAIMQKKYSKHGSGSHHHHHH

SEQ ID NO: 129 - protein, 119 aa, Artificial Sequence
  Synthetic: Feline IL4_C-His6
QNFNNTLKEIIKTLNILTARNDSCMELTVMDVLAAPKNTSDKEIFCRATTVLRQIYTHHNCSTKFLKGLDRNLSSMANRTCSVNEVKKCTLKDFLERLKAIMQKKYSKHGSGSHHHHHH

SEQ ID NO: 130 - protein, 148 aa, Artificial Sequence
  Synthetic: Equine IL4_C-His6 with leader
MGLISQLIPALVCLLACTSNFIQGCKYDITLQEIIKTLNNLTDGKGKNSCMELTVADAFAGPKNTDGKEICRAAKVLQQLYKRHDRSLIKECLSGLDRNLKGMANGTCCTVNEAKKSTLKDFLERLKTIMKEKYSKCQGSGSHHHHHH

SEQ ID NO: 131 - protein, 124 aa, Artificial Sequence
  Synthetic: Equine IL4_C-His6
CKYDITLQEIIKTLNNLTDGKGKNSCMELTVADAFAGPKNTDGKEICRAAKVLQQLYKRHDRSLIKECLSGLDRNLKGMANGTCCTVNEAKKSTLKDFLERLKTIMKEKYSKCQGSGSHHHHHH

SEQ ID NO: 132 - protein, 22 aa, Artificial Sequence
  Synthetic: exemplary leader sequence
MDMRVPAQLLGLLLLWLRGARC

SEQ ID NO: 133 - protein, 455 aa, Artificial Sequence
  Synthetic: Canine/Human IL4R-ECD_ C-HuFc_His6_ Fusion1 (Fusion 1)
GSVKVLHEPSCFSDYISTSVCQWKMDHPTNCSAELRLSYQLDFMGSENHTCVPENNGGAGCVCHLLMDDVVSADNYTLDLWAGQQLLWKGSFKPSEHVKPRAPGNLTVHTNVSDTLLLTWSNPYPPDNYLYNHLTYAVNIWSENDPADFRIYNVTYLEPSLRIAASTLKSGISYRARVRAWAQCYNTTWSEWSPSTKWHNSYREPFEQHGSENLYFQGPKSCDKTHTCPPCPAPELLGGPSVFLFPPKPKDTLMISRTPEVTCVVVDVSHEDPEVKFNWYVDGVEVHNAKTKPREEQYNSTYRVVSVLTVLHQDWLNGKEYKCKVSNKALPAPIEKTISKAKGQPREPQVYTLPPSRDELTKNQVSLTCLVKGFYPSDIAVEWESNGQPENNYKTTPPVLDSDGSFFLYSKLTVDKSRWQQGNVFSCSVMHEALHNHYTQKSLSLSPGKHHHHHH

SEQ ID NO: 134 - protein, 455 aa, Artificial Sequence
  Synthetic: Canine/Human IL4R-ECD_ C-HuFc_His6_ Fusion2 (Fusion 2)
GNMKVLQEPTCVSDYMSISTCEWKMNGPTNCSTELRLLYQLVFLLSEAHTCIPENREDSVCVCSMPIDDAVEADVYQLDLWAGQQLLWSGSFQPSKHVKPRTPGNLTVHTNVSDTLLLTWSNPYPPDNYLYNHLTYAVNIWSENDPADFRIYNVTYLEPSLRIAASTLKSGISYRARVRAWAQCYNTTWSEWSPSTKWHNSYREPFEQHGSENLYFQGPKSCDKTHTCPPCPAPELLGGPSVFLFPPKPKDTLMISRTPEVTCVVVDVSHEDPEVKFNWYVDGVEVHNAKTKPREEQYNSTYRVVSVLTVLHQDWLNGKEYKCKVSNKALPAPIEKTISKAKGQPREPQVYTLPPSRDELTKNQVSLTCLVKGFYPSDIAVEWESNGQPENNYKTTPPVLDSDGSFFLYSKLTVDKSRWQQGNVFSCSVMHEALHNHYTQKSLSLSPGKHHHHHH

SEQ ID NO: 135 - protein, 450 aa, Artificial Sequence
  Synthetic: Canine/Human IL4R-ECD_ C-HuFc_His6_ Fusion3 (Fusion 3)
GNMKVLQEPTCVSDYMSISTCEWKMNGPTNCSTELRLLYQLVFLLSEAHTCIPENNGGAGCVCHLLMDDVVSADNYTLDLWAGQQLLWKGSFKPSEHVKPRAPGNLTVHPNISHTWLLMWTNPYPTENHLHSELTYMVNVSNDNDPEDFKVYNVTYMGPTLRLAASTLKSGASYSARVRAWAQTYNSTWSDWSPSTTWLNYYEPGSENLYFQGPKSCDKTHTCPPCPAPELLGGPSVFLFPPKPKDTLMISRTPEVTCVVVDVSHEDPEVKFNWYVDGVEVHNAKTKPREEQYNSTYRVVSVLTVLHQDWLNGKEYKCKVSNKALPAPIEKTISKAKGQPREPQVYTLPPSRDELTKNQVSLTCLVKGFYPSDIAVEWESNGQPENNYKTTPPVLDSDGSFFLYSKLTVDKSRWQQGNVFSCSVMHEALHNHYTQKSLSLSPGKHHHHHH

SEQ ID NO: 136 - protein, 455 aa, Artificial Sequence
  Synthetic: Canine/Human IL4R-ECD_ C-HuFc_His6_ Fusion4 (Fusion 4)
GSVKVLHEPSCFSDYISTSVCQWKMDHPTNCSAELRLSYQLDFMGSENHTCVPENREDSVCVCSMPIDDAVEADVYQLDLWAGQQLLWSGSFQPSKHVKPRTPGNLTVHTNVSDTLLLTWSNPYPPDNYLYNHLTYAVNIWSENDPADFRIYNVTYLEPSLRIAASTLKSGISYRARVRAWAQCYNTTWSEWSPSTKWHNSYREPFEQHGSENLYFQGPKSCDKTHTCPPCPAPELLGGPSVFLFPPKPKDTLMISRTPEVTCVVVDVSHEDPEVKFNWYVDGVEVHNAKTKPREEQYNSTYRVVSVLTVLHQDWLNGKEYKCKVSNKALPAPIEKTISKAKGQPREPQVYTLPPSRDELTKNQVSLTCLVKGFYPSDIAVEWESNGQPENNYKTTPPVLDSDGSFFLYSKLTVDKSRWQQGNVFSCSVMHEALHNHYTQKSLSLSPGKHHHHHH

SEQ ID NO: 137 - protein, 450 aa, Artificial Sequence
  Synthetic: Canine/Human IL4R-ECD_ C-HuFc_His6_ Fusion5 (Fusion 5)
GNMKVLQEPTCVSDYMSISTCEWKMNGPTNCSTELRLLYQLVFLLSEAHTCIPENREDSVCVCSMPIDDAVEADVYQLDLWAGQQLLWSGSFQPSKHVKPRTPGNLTVHPNISHTWLLMWTNPYPTENHLHSELTYMVNVSNDNDPEDFKVYNVTYMGPTLRLAASTLKSGASYSARVRAWAQTYNSTWSDWSPSTTWLNYYEPGSENLYFQGPKSCDKTHTCPPCPAPELLGGPSVFLFPPKPKDTLMISRTPEVTCVVVDVSHEDPEVKFNWYVDGVEVHNAKTKPREEQYNSTYRVVSVLTVLHQDWLNGKEYKCKVSNKALPAPIEKTISKAKGQPREPQVYTLPPSRDELTKNQVSLTCLVKGFYPSDIAVEWESNGQPENNYKTTPPVLDSDGSFFLYSKLTVDKSRWQQGNVFSCSVMHEALHNHYTQKSLSLSPGKHHHHHH

SEQ ID NO: 138 - protein, 450 aa, Artificial Sequence
  Synthetic: Canine/Human IL4R-ECD_ C-HuFc_His6_ Fusion6 (Fusion 6)
GSVKVLHEPSCFSDYISTSVCQWKMDHPTNCSAELRLSYQLDFMGSENHTCVPENNGGAGCVCHLLMDDVVSADNYTLDLWAGQQLLWKGSFKPSEHVKPRAPGNLTVHPNISHTWLLMWTNPYPTENHLHSELTYMVNVSNDNDPEDFKVYNVTYMGPTLRLAASTLKSGASYSARVRAWAQTYNSTWSDWSPSTTWLNYYEPGSENLYFQGPKSCDKTHTCPPCPAPELLGGPSVFLFPPKPKDTLMISRTPEVTCVVVDVSHEDPEVKFNWYVDGVEVHNAKTKPREEQYNSTYRVVSVLTVLHQDWLNGKEYKCKVSNKALPAPIEKTISKAKGQPREPQVYTLPPSRDELTKNQVSLTCLVKGFYPSDIAVEWESNGQPENNYKTTPPVLDSDGSFFLYSKLTVDKSRWQQGNVFSCSVMHEALHNHYTQKSLSLSPGKHHHHHH

SEQ ID NO: 139 - protein, 450 aa, Artificial Sequence
  Synthetic: Canine/Human IL4R-ECD_ C-HuFc_His6_ Fusion7 (Fusion 7)
GNMKVLQEPTCVSDYMSISTCEWKMNGPTNCSAELRLSYQLDFMGSENHTCVPENREDSVCVCSMPIDDAVEADVYQLDLWAGQQLLWSGSFQPSKHVKPRTPGNLTVHPNISHTWLLMWTNPYPTENHLHSELTYMVNVSNDNDPEDFKVYNVTYMGPTLRLAASTLKSGASYSARVRAWAQTYNSTWSDWSPSTTWLNYYEPGSENLYFQGPKSCDKTHTCPPCPAPELLGGPSVFLFPPKPKDTLMISRTPEVTCVVVDVSHEDPEVKFNWYVDGVEVHNAKTKPREEQYNSTYRVVSVLTVLHQDWLNGKEYKCKVSNKALPAPIEKTISKAKGQPREPQVYTLPPSRDELTKNQVSLTCLVKGFYPSDIAVEWESNGQPENNYKTTPPVLDSDGSFFLYSKLTVDKSRWQQGNVFSCSVMHEALHNHYTQKSLSLSPGKHHHHHH

SEQ ID NO: 140 - protein, 450 aa, Artificial Sequence
  Synthetic: Canine/Human IL4R-ECD_ C-HuFc_His6_ Fusion8 (Fusion 8)
GSVKVLHEPSCFSDYISTSVCQWKMDHPTNCSTELRLLYQLVFLLSEAHTCIPENREDSVCVCSMPIDDAVEADVYQLDLWAGQQLLWSGSFQPSKHVKPRTPGNLTVHPNISHTWLLMWTNPYPTENHLHSELTYMVNVSNDNDPEDFKVYNVTYMGPTLRLAASTLKSGASYSARVRAWAQTYNSTWSDWSPSTTWLNYYEPGSENLYFQGPKSCDKTHTCPPCPAPELLGGPSVFLFPPKPKDTLMISRTPEVTCVVVDVSHEDPEVKFNWYVDGVEVHNAKTKPREEQYNSTYRVVSVLTVLHQDWLNGKEYKCKVSNKALPAPIEKTISKAKGQPREPQVYTLPPSRDELTKNQVSLTCLVKGFYPSDIAVEWESNGQPENNYKTTPPVLDSDGSFFLYSKLTVDKSRWQQGNVFSCSVMHEALHNHYTQKSLSLSPGKHHHHHH

SEQ ID NO: 141 - protein, 450 aa, Artificial Sequence
  Synthetic: Canine/Human IL4R-ECD_ C-HuFc_His6_ Fusion9 (Fusion 9)
GSVKVLHEPSCFSDYISTSVCQWKMDHPTNCSTELRLLYQLDFMGSENHTCVPENREDSVCVCSMPIDDAVEADVYQLDLWAGQQLLWSGSFQPSKHVKPRTPGNLTVHPNISHTWLLMWTNPYPTENHLHSELTYMVNVSNDNDPEDFKVYNVTYMGPTLRLAASTLKSGASYSARVRAWAQTYNSTWSDWSPSTTWLNYYEPGSENLYFQGPKSCDKTHTCPPCPAPELLGGPSVFLFPPKPKDTLMISRTPEVTCVVVDVSHEDPEVKFNWYVDGVEVHNAKTKPREEQYNSTYRVVSVLTVLHQDWLNGKEYKCKVSNKALPAPIEKTISKAKGQPREPQVYTLPPSRDELTKNQVSLTCLVKGFYPSDIAVEWESNGQPENNYKTTPPVLDSDGSFFLYSKLTVDKSRWQQGNVFSCSVMHEALHNHYTQKSLSLSPGKHHHHHH

SEQ ID NO: 142 - protein, 450 aa, Artificial Sequence
  Synthetic: Canine/Human IL4R-ECD_ C HuFc_His6_ Fusion10  (Fusion 10)
GSVKVLHEPSCFSDYISTSVCQWKMDHPTNCSAELRLSYQLVFLLSEAHTCIPENREDSVCVCSMPIDDAVEADVYQLDLWAGQQLLWSGSFQPSKHVKPRTPGNLTVHPNISHTWLLMWTNPYPTENHLHSELTYMVNVSNDNDPEDFKVYNVTYMGPTLRLAASTLKSGASYSARVRAWAQTYNSTWSDWSPSTTWLNYYEPGSENLYFQGPKSCDKTHTCPPCPAPELLGGPSVFLFPPKPKDTLMISRTPEVTCVVVDVSHEDPEVKFNWYVDGVEVHNAKTKPREEQYNSTYRVVSVLTVLHQDWLNGKEYKCKVSNKALPAPIEKTISKAKGQPREPQVYTLPPSRDELTKNQVSLTCLVKGFYPSDIAVEWESNGQPENNYKTTPPVLDSDGSFFLYSKLTVDKSRWQQGNVFSCSVMHEALHNHYTQKSLSLSPGKHHHHHH

SEQ ID NO: 143 - protein, 450 aa, Artificial Sequence
  Synthetic: Canine/Human IL4R-ECD_ C HuFc_His6_ Fusion11 (Fusion 11)
GSVKVLHEPSCFSDYISTSVCQWKMDHPTNCSAELRLSYQLDFMGSENHTCVPENNGGAGCVCHLLMDDVVEADVYQLDLWAGQQLLWSGSFQPSKHVKPRTPGNLTVHPNISHTWLLMWTNPYPTENHLHSELTYMVNVSNDNDPEDFKVYNVTYMGPTLRLAASTLKSGASYSARVRAWAQTYNSTWSDWSPSTTWLNYYEPGSENLYFQGPKSCDKTHTCPPCPAPELLGGPSVFLFPPKPKDTLMISRTPEVTCVVVDVSHEDPEVKFNWYVDGVEVHNAKTKPREEQYNSTYRVVSVLTVLHQDWLNGKEYKCKVSNKALPAPIEKTISKAKGQPREPQVYTLPPSRDELTKNQVSLTCLVKGFYPSDIAVEWESNGQPENNYKTTPPVLDSDGSFFLYSKLTVDKSRWQQGNVFSCSVMHEALHNHYTQKSLSLSPGKHHHHHH

SEQ ID NO: 144 - protein, 450 aa, Artificial Sequence
  Synthetic: Canine/Human IL4R-ECD_C HuFc_His6_ Fusion12 (Fusion 12)
GSVKVLHEPSCFSDYISTSVCQWKMDHPTNCSAELRLSYQLDFMGSENHTCVPENREDSVCVCSMPIDDAVSADNYTLDLWAGQQLLWKGSFQPSKHVKPRTPGNLTVHPNISHTWLLMWTNPYPTENHLHSELTYMVNVSNDNDPEDFKVYNVTYMGPTLRLAASTLKSGASYSARVRAWAQTYNSTWSDWSPSTTWLNYYEPGSENLYFQGPKSCDKTHTCPPCPAPELLGGPSVFLFPPKPKDTLMISRTPEVTCVVVDVSHEDPEVKFNWYVDGVEVHNAKTKPREEQYNSTYRVVSVLTVLHQDWLNGKEYKCKVSNKALPAPIEKTISKAKGQPREPQVYTLPPSRDELTKNQVSLTCLVKGFYPSDIAVEWESNGQPENNYKTTPPVLDSDGSFFLYSKLTVDKSRWQQGNVFSCSVMHEALHNHYTQKSLSLSPGKHHHHHH

SEQ ID NO: 145 - protein, 450 aa, Artificial Sequence
  Synthetic: Canine/Human IL4R-ECD_C HuFc_His6_ Fusion13 (Fusion 13)
GSVKVLHEPSCFSDYISTSVCQWKMDHPTNCSAELRLSYQLDFMGSENHTCVPENREDSVCVCSMPIDDAVEADVYQLDLWAGQQLLWSGSFKPSEHVKPRAPGNLTVHPNISHTWLLMWTNPYPTENHLHSELTYMVNVSNDNDPEDFKVYNVTYMGPTLRLAASTLKSGASYSARVRAWAQTYNSTWSDWSPSTTWLNYYEPGSENLYFQGPKSCDKTHTCPPCPAPELLGGPSVFLFPPKPKDTLMISRTPEVTCVVVDVSHEDPEVKFNWYVDGVEVHNAKTKPREEQYNSTYRVVSVLTVLHQDWLNGKEYKCKVSNKALPAPIEKTISKAKGQPREPQVYTLPPSRDELTKNQVSLTCLVKGFYPSDIAVEWESNGQPENNYKTTPPVLDSDGSFFLYSKLTVDKSRWQQGNVFSCSVMHEALHNHYTQKSLSLSPGKHHHHHH

SEQ ID NO: 146 - protein, 450 aa, Artificial Sequence
  Synthetic: Canine/Human IL4R-ECD_ C HuFc_His6_ Fusion14 (Fusion 14)
GSVKVLHEPSCFSDYISTSVCQWKMDHPTNCSAELRLSYQLDFMGSENHTCVPENREDSVCVCSMPIDDVVSADNYTLDLWAGQQLLWKGSFKPSKHVKPRTPGNLTVHPNISHTWLLMWTNPYPTENHLHSELTYMVNVSNDNDPEDFKVYNVTYMGPTLRLAASTLKSGASYSARVRAWAQTYNSTWSDWSPSTTWLNYYEPGSENLYFQGPKSCDKTHTCPPCPAPELLGGPSVFLFPPKPKDTLMISRTPEVTCVVVDVSHEDPEVKFNWYVDGVEVHNAKTKPREEQYNSTYRVVSVLTVLHQDWLNGKEYKCKVSNKALPAPIEKTISKAKGQPREPQVYTLPPSRDELTKNQVSLTCLVKGFYPSDIAVEWESNGQPENNYKTTPPVLDSDGSFFLYSKLTVDKSRWQQGNVFSCSVMHEALHNHYTQKSLSLSPGKHHHHHH

SEQ ID NO: 147 - protein, 450 aa, Artificial Sequence
  Synthetic: Canine IL4R-ECD_ C HuFc_His6.A33T (Mutant 1)
GSVKVLHEPSCFSDYISTSVCQWKMDHPTNCSTELRLSYQLDFMGSENHTCVPENREDSVCVCSMPIDDAVEADVYQLDLWAGQQLLWSGSFQPSKHVKPRTPGNLTVHPNISHTWLLMWTNPYPTENHLHSELTYMVNVSNDNDPEDFKVYNVTYMGPTLRLAASTLKSGASYSARVRAWAQTYNSTWSDWSPSTTWLNYYEPGSENLYFQGPKSCDKTHTCPPCPAPELLGGPSVFLFPPKPKDTLMISRTPEVTCVVVDVSHEDPEVKFNWYVDGVEVHNAKTKPREEQYNSTYRVVSVLTVLHQDWLNGKEYKCKVSNKALPAPIEKTISKAKGQPREPQVYTLPPSRDELTKNQVSLTCLVKGFYPSDIAVEWESNGQPENNYKTTPPVLDSDGSFFLYSKLTVDKSRWQQGNVFSCSVMHEALHNHYTQKSLSLSPGKHHHHHH

SEQ ID NO: 148 - protein, 450 aa, Artificial Sequence
  Synthetic: Canine IL4R-ECD_ C HuFc_His6.M44A (Mutant 2)
GSVKVLHEPSCFSDYISTSVCQWKMDHPTNCSAELRLSYQLDFAGSENHTCVPENREDSVCVCSMPIDDAVEADVYQLDLWAGQQLLWSGSFQPSKHVKPRTPGNLTVHPNISHTWLLMWTNPYPTENHLHSELTYMVNVSNDNDPEDFKVYNVTYMGPTLRLAASTLKSGASYSARVRAWAQTYNSTWSDWSPSTTWLNYYEPGSENLYFQGPKSCDKTHTCPPCPAPELLGGPSVFLFPPKPKDTLMISRTPEVTCVVVDVSHEDPEVKFNWYVDGVEVHNAKTKPREEQYNSTYRVVSVLTVLHQDWLNGKEYKCKVSNKALPAPIEKTISKAKGQPREPQVYTLPPSRDELTKNQVSLTCLVKGFYPSDIAVEWESNGQPENNYKTTPPVLDSDGSFFLYSKLTVDKSRWQQGNVFSCSVMHEALHNHYTQKSLSLSPGKHHHHHH

SEQ ID NO: 149 - protein, 450 aa, Artificial Sequence
  Synthetic: Canine IL4R-ECD_ C HuFc_His6.G45A (Mutant 3)
GSVKVLHEPSCFSDYISTSVCQWKMDHPTNCSAELRLSYQLDFMASENHTCVPENREDSVCVCSMPIDDAVEADVYQLDLWAGQQLLWSGSFQPSKHVKPRTPGNLTVHPNISHTWLLMWTNPYPTENHLHSELTYMVNVSNDNDPEDFKVYNVTYMGPTLRLAASTLKSGASYSARVRAWAQTYNSTWSDWSPSTTWLNYYEPGSENLYFQGPKSCDKTHTCPPCPAPELLGGPSVFLFPPKPKDTLMISRTPEVTCVVVDVSHEDPEVKFNWYVDGVEVHNAKTKPREEQYNSTYRVVSVLTVLHQDWLNGKEYKCKVSNKALPAPIEKTISKAKGQPREPQVYTLPPSRDELTKNQVSLTCLVKGFYPSDIAVEWESNGQPENNYKTTPPVLDSDGSFFLYSKLTVDKSRWQQGNVFSCSVMHEALHNHYTQKSLSLSPGKHHHHHH

SEQ ID NO: 150 - protein, 450 aa, Artificial Sequence
  Synthetic: Canine IL4R-ECD_ C HuFc_His6.N48A (Mutant 4)
GSVKVLHEPSCFSDYISTSVCQWKMDHPTNCSAELRLSYQLDFMGSEAHTCVPENREDSVCVCSMPIDDAVEADVYQLDLWAGQQLLWSGSFQPSKHVKPRTPGNLTVHPNISHTWLLMWTNPYPTENHLHSELTYMVNVSNDNDPEDFKVYNVTYMGPTLRLAASTLKSGASYSARVRAWAQTYNSTWSDWSPSTTWLNYYEPGSENLYFQGPKSCDKTHTCPPCPAPELLGGPSVFLFPPKPKDTLMISRTPEVTCVVVDVSHEDPEVKFNWYVDGVEVHNAKTKPREEQYNSTYRVVSVLTVLHQDWLNGKEYKCKVSNKALPAPIEKTISKAKGQPREPQVYTLPPSRDELTKNQVSLTCLVKGFYPSDIAVEWESNGQPENNYKTTPPVLDSDGSFFLYSKLTVDKSRWQQGNVFSCSVMHEALHNHYTQKSLSLSPGKHHHHHH

SEQ ID NO: 151 - protein, 450 aa, Artificial Sequence
  Synthetic: Canine IL4R-ECD_ C HuFc_His6.S38A (Mutant 5)
GSVKVLHEPSCFSDYISTSVCQWKMDHPTNCSAELRLAYQLDFMGSENHTCVPENREDSVCVCSMPIDDAVEADVYQLDLWAGQQLLWSGSFQPSKHVKPRTPGNLTVHPNISHTWLLMWTNPYPTENHLHSELTYMVNVSNDNDPEDFKVYNVTYMGPTLRLAASTLKSGASYSARVRAWAQTYNSTWSDWSPSTTWLNYYEPGSENLYFQGPKSCDKTHTCPPCPAPELLGGPSVFLFPPKPKDTLMISRTPEVTCVVVDVSHEDPEVKFNWYVDGVEVHNAKTKPREEQYNSTYRVVSVLTVLHQDWLNGKEYKCKVSNKALPAPIEKTISKAKGQPREPQVYTLPPSRDELTKNQVSLTCLVKGFYPSDIAVEWESNGQPENNYKTTPPVLDSDGSFFLYSKLTVDKSRWQQGNVFSCSVMHEALHNHYTQKSLSLSPGKHHHHHH

SEQ ID NO: 152 - protein, 450 aa, Artificial Sequence
  Synthetic: Canine IL4R-ECD_ C HuFc_His6.D42A  (Mutant 6)
GSVKVLHEPSCFSDYISTSVCQWKMDHPTNCSAELRLSYQLAFMGSENHTCVPENREDSVCVCSMPIDDAVEADVYQLDLWAGQQLLWSGSFQPSKHVKPRTPGNLTVHPNISHTWLLMWTNPYPTENHLHSELTYMVNVSNDNDPEDFKVYNVTYMGPTLRLAASTLKSGASYSARVRAWAQTYNSTWSDWSPSTTWLNYYEPGSENLYFQGPKSCDKTHTCPPCPAPELLGGPSVFLFPPKPKDTLMISRTPEVTCVVVDVSHEDPEVKFNWYVDGVEVHNAKTKPREEQYNSTYRVVSVLTVLHQDWLNGKEYKCKVSNKALPAPIEKTISKAKGQPREPQVYTLPPSRDELTKNQVSLTCLVKGFYPSDIAVEWESNGQPENNYKTTPPVLDSDGSFFLYSKLTVDKSRWQQGNVFSCSVMHEALHNHYTQKSLSLSPGKHHHHHH

SEQ ID NO: 153 - protein, 450 aa, Artificial Sequence
  Synthetic: Canine IL4R-ECD_ C HuFc_His6.H49A  (Mutant 7)
GSVKVLHEPSCFSDYISTSVCQWKMDHPTNCSAELRLSYQLDFMGSENATCVPENREDSVCVCSMPIDDAVEADVYQLDLWAGQQLLWSGSFQPSKHVKPRTPGNLTVHPNISHTWLLMWTNPYPTENHLHSELTYMVNVSNDNDPEDFKVYNVTYMGPTLRLAASTLKSGASYSARVRAWAQTYNSTWSDWSPSTTWLNYYEPGSENLYFQGPKSCDKTHTCPPCPAPELLGGPSVFLFPPKPKDTLMISRTPEVTCVVVDVSHEDPEVKFNWYVDGVEVHNAKTKPREEQYNSTYRVVSVLTVLHQDWLNGKEYKCKVSNKALPAPIEKTISKAKGQPREPQVYTLPPSRDELTKNQVSLTCLVKGFYPSDIAVEWESNGQPENNYKTTPPVLDSDGSFFLYSKLTVDKSRWQQGNVFSCSVMHEALHNHYTQKSLSLSPGKHHHHHH

SEQ ID NO: 154 - protein, 131 aa, Canis lupus familiaris
  misc_feature (1)..(131): Canine IL13 precursor
MALWLTVVIALTCLGGLASPSPVTPSPTLKELIEELVNITQNQASLCNGSMVWSVNLTAGMYCAALESLINVSDCSAIQRTQRMLKALCSQKPAAGQISSERSRDTKIEVIQLVKNLLTYVRGVYRHGNFR

SEQ ID NO: 155 - protein, 184 aa, Felis catus
  misc_feature (1)..(184): Feline IL13 precursor
MWFLDSTRQSGDQGGRRHTWPIKATARGQGHKPLSLGQPTCPLLAPPVLALGSMALWLTVVIALTCLGGLASPGPHSRRELKELIEELVNITQNQVSLCNGSMVWSVNLTTGMQYCAALESLINVSDCTAIQRTQRMLKALCTQKPSAGQTASERSRDTKIEVIQLVKNLLNHLRRNFRHGNFK

SEQ ID NO: 156 - protein, 139 aa, Artificial Sequence
  Synthetic: Canine IL13_C-His6 with leader
MALWLTVVIALTCLGGLASPSPVTPSPTLKELIEELVNITQNQASLCNGSMVWSVNLTAGMYCAALESLINVSDCSAIQRTQRMLKALCSQKPAAGQISSERSRDTKIEVIQLVKNLLTYVRGVYRHGNFRGSHHHHHH

SEQ ID NO: 157 - protein, 121 aa, Artificial Sequence
  Synthetic: Canine IL13_C-His6
SPSPVTPSPTLKELIEELVNITQNQASLCNGSMVWSVNLTAGMYCAALESLINVSDCSAIQRTQRMLKALCSQKPAAGQISSERSRDTKIEVIQLVKNLLTYVRGVYRHGNFRGSHHHHHH

SEQ ID NO: 158 - protein, 144 aa, Artificial Sequence
  Synthetic: Feline IL13_C-His6 with leader
MALWLTVVIALTCLGGLASPGPHSRRELKELIEELVNITQNQLLQVSLCNGSMVWSVNLTTGMQYCAALESLINVSDCTAIQRTQRMLKALCTQKPSAGQTASERSRDTKIEVIQLVKNLLNHLRRNFRHGNFKGSGSHHHHHH

SEQ ID NO: 159 - protein, 126 aa, Artificial Sequence
  Synthetic: Feline IL13_C-His6
SPGPHSRRELKELIEELVNITQNQLLQVSLCNGSMVWSVNLTTGMQYCAALESLINVSDCTAIQRTQRMLKALCTQKPSAGQTASERSRDTKIEVIQLVKNLLNHLRRNFRHGNFKGSGSHHHHHH

SEQ ID NO: 160 - protein, 427 aa, Canis lupus familiaris
  misc_feature (1)..(427): Canine IL13R
MERPARLCGLWALLLCAAGGRGGGVAAPTETQPPVTNLSVSVENLCTVIWTWDPPEGASPNCTLRYFSHFDNKQDKKIAPETHRSKEVPLNERICLQVGSQCSTNESDNPSILVEKCTPPPEGDPESAVTELQCVWHNLSYMKCTWLPGRNTSPDTNYTLYYWHSSLGKILQCEDIYREGQHIGCSFALTNLKDSSFEQHSVQIVVKDNAGKIRPSFNIVPLTSHVKPDPPHIKRLFFQNGNLYVQWKNPQNFYSRCLSYQVEVNNSQTETNDIFYVEEAKCQNSEFEGNLEGTICFMVPGVLPDTLNTVRIRVRTNKLCYEDDKLWSNWSQAMSIGENTDPTFYITMLLATPVIVAGAIIVLLLYLKRLKIIIFPPIPDPGKIFKEMFGDQNDDTLHWRKYDIYEKQTKEETDSVVLIENLKKASQ

SEQ ID NO: 161 - protein, 315 aa, Artificial Sequence
  Synthetic: Canine IL13R ECD
TETQPPVTNLSVSVENLCTVIWTWDPPEGASPNCTLRYFSHFDNKQDKKIAPETHRSKEVPLNERICLQVGSQCSTNESDNPSILVEKCTPPPEGDPESAVTELQCVWHNLSYMKCTWLPGRNTSPDTNYTLYYWHSSLGKILQCEDIYREGQHIGCSFALTNLKDSSFEQHSVQIVVKDNAGKIRPSFNIVPLTSHVKPDPPHIKRLFFQNGNLYVQWKNPQNFYSRCLSYQVEVNNSQTETNDIFYVEEAKCQNSEFEGNLEGTICFMVPGVLPDTLNTVRIRVRTNKLCYEDDKLWSNWSQAMSIGENTDPT

SEQ ID NO: 162 - protein, 221 aa, Artificial Sequence
  Synthetic: Exemplary wild-type canine IgG-A Fc   Protein A  C1q CD16
PVPEPLGGPSVLIFPPKPKDILRITRTPEVTCVVLDLGREDPEVQISWFVDGKEVHTAKTQSREQQFNGTYRVVSVLPIEHQDWLTGKEFKCRVNHIDLPSPIERTISKARGRAHKPSVYVLPPSPKELSSSDTVSITCLIKDFYPPDIDVEWQSNGQQEPERKHRMTPPQLDEDGSYFLYSKLSVDKSRWQQGDPFTCAVMHETLQNHYTDLSLSHSPGK

SEQ ID NO: 163 - protein, 220 aa, Artificial Sequence
  Synthetic: Exemplary wild-type canine IgG-B Fc   Protein A + C1q + CD16 +
PAPEMLGGPSVFIFPPKPKDTLLIARTPEVTCVVVDLDPEDPEVQISWFVDGKQMQTAKTQPREEQFNGTYRVVSVLPIGHQDWLKGKQFTCKVNNKALPSPIERTISKARGQAHQPSVYVLPPSREELSKNTVSLTCLIKDFFPPDIDVEWQSNGQQEPESKYRTTPPQLDEDGSYFLYSKLSVDKSRWQRGDTFICAVMHEALHNHYTQESLSHSPGK

SEQ ID NO: 164 - protein, 237 aa, Artificial Sequence
  Synthetic: Exemplary wild-type canine IgG-B Fc with hinge Protein A + C1q + CD16 +
PKRENGRVPRPPDCPKCPAPEMLGGPSVFIFPPKPKDTLLIARTPEVTCVVVDLDPEDPEVQISWFVDGKQMQTAKTQPREEQFNGTYRVVSVLPIGHQDWLKGKQFTCKVNNKALPSPIERTISKARGQAHQPSVYVLPPSREELSKNTVSLTCLIKDFFPPDIDVEWQSNGQQEPESKYRTTPPQLDEDGSYFLYSKLSVDKSRWQRGDTFICAVMHEALHNHYTQESLSHSPGK

SEQ ID NO: 165 - protein, 220 aa, Artificial Sequence
  Synthetic: Exemplary wild-type canine IgG-C Fc   Protein A   C1q + CD16 +
PGCGLLGGPSVFIFPPKPKDILVTARTPTVTCVVVDLDPENPEVQISWFVDSKQVQTANTQPREEQSNGTYRVVSVLPIGHQDWLSGKQFKCKVNNKALPSPIEEIISKTPGQAHQPNVYVLPPSRDEMSKNTVTLTCLVKDFFPPEIDVEWQSNGQQEPESKYRMTPPQLDEDGSYFLYSKLSVDKSRWQRGDTFICAVMHEALHNHYTQISLSHSPGK

SEQ ID NO: 166 - protein, 235 aa, Artificial Sequence
  Synthetic: Exemplary wild-type canine IgG-C Fc with hinge Protein A   C1q + CD16 +
AKECECKCNCNNCPCPGCGLLGGPSVFIFPPKPKDILVTARTPTVTCVVVDLDPENPEVQISWFVDSKQVQTANTQPREEQSNGTYRVVSVLPIGHQDWLSGKQFKCKVNNKALPSPIEEIISKTPGQAHQPNVYVLPPSRDEMSKNTVTLTCLVKDFFPPEIDVEWQSNGQQEPESKYRMTPPQLDEDGSYFLYSKLSVDKSRWQRGDTFICAVMHEALHNHYTQISLSHSPGK

SEQ ID NO: 167 - protein, 221 aa, Artificial Sequence
  Synthetic: Exemplary wild-type canine IgG-D Fc   Protein A  C1q CD16
PVPESLGGPSVFIFPPKPKDILRITRTPEITCVVLDLGREDPEVQISWFVDGKEVHTAKTQPREQQFNSTYRVVSVLPIEHQDWLTGKEFKCRVNHIGLPSPIERTISKARGQAHQPSVYVLPPSPKELSSSDTVTLTCLIKDFFPPEIDVEWQSNGQPEPESKYHTTAPQLDEDGSYFLYSKLSVDKSRWQQGDTFTCAVMHEALQNHYTDLSLSHSPGK

SEQ ID NO: 168 - protein, 221 aa, Artificial Sequence
  Synthetic: Exemplary variant canine IgG-A Fc   C1q  Protein A + I(21)T R(23)L T(25)A E(80)G T(205)A Q(207)H
PVPEPLGGPSVLIFPPKPKDTLLIARTPEVTCVVLDLGREDPEVQISWFVDGKEVHTAKTQSREQQFNGTYRVVSVLPIGHQDWLTGKEFKCRVNHIDLPSPIERTISKARGRAHKPSVYVLPPSPKELSSSDTVSITCLIKDFYPPDIDVEWQSNGQQEPERKHRMTPPQLDEDGSYFLYSKLSVDKSRWQQGDPFTCAVMHEALHNHYTDLSLSHSPGK

SEQ ID NO: 169 - protein, 221 aa, Artificial Sequence
  Synthetic: Exemplary variant canine IgG-A Fc   C1q  Protein A + I(21)T Q(207)H
PVPEPLGGPSVLIFPPKPKDTLRITRTPEVTCVVLDLGREDPEVQISWFVDGKEVHTAKTQSREQQFNGTYRVVSVLPIEHQDWLTGKEFKCRVNHIDLPSPIERTISKARGRAHKPSVYVLPPSPKELSSSDTVSITCLIKDFYPPDIDVEWQSNGQQEPERKHRMTPPQLDEDGSYFLYSKLSVDKSRWQQGDPFTCAVMHETLHNHYTDLSLSHSPGK

SEQ ID NO: 170 - protein, 220 aa, Artificial Sequence
  Synthetic: Exemplary variant canine IgG-B Fc  Protein A + C1q K(93)R
PAPEMLGGPSVFIFPPKPKDTLLIARTPEVTCVVVDLDPEDPEVQISWFVDGKQMQTAKTQPREEQFNGTYRVVSVLPIGHQDWLKGKQFTCRVNNKALPSPIERTISKARGQAHQPSVYVLPPSREELSKNTVSLTCLIKDFFPPDIDVEWQSNGQQEPESKYRTTPPQLDEDGSYFLYSKLSVDKSRWQRGDTFICAVMHEALHNHYTQESLSHSPGK

SEQ ID NO: 171 - protein, 220 aa, Artificial Sequence
  Synthetic: Exemplary variant canine IgG-B Fc  Protein A + C1q + CD16   M(5)P
PAPEPLGGPSVFIFPPKPKDTLLIARTPEVTCVVVDLDPEDPEVQISWFVDGKQMQTAKTQPREEQFNGTYRVVSVLPIGHQDWLKGKQFTCKVNNKALPSPIERTISKARGQAHQPSVYVLPPSREELSKNTVSLTCLIKDFFPPDIDVEWQSNGQQEPESKYRTTPPQLDEDGSYFLYSKLSVDKSRWQRGDTFICAVMHEALHNHYTQESLSHSPGK

SEQ ID NO: 172 - protein, 220 aa, Artificial Sequence
  Synthetic: Exemplary variant canine IgG-B Fc  Protein A + C1q + CD16   P(39)R
PAPEMLGGPSVFIFPPKPKDTLLIARTPEVTCVVVDLDREDPEVQISWFVDGKQMQTAKTQPREEQFNGTYRVVSVLPIGHQDWLKGKQFTCKVNNKALPSPIERTISKARGQAHQPSVYVLPPSREELSKNTVSLTCLIKDFFPPDIDVEWQSNGQQEPESKYRTTPPQLDEDGSYFLYSKLSVDKSRWQRGDTFICAVMHEALHNHYTQESLSHSPGK

SEQ ID NO: 173 - protein, 220 aa, Artificial Sequence
  Synthetic: Exemplary variant canine IgG-B Fc  Protein A + C1q + CD16   D(38)G
PAPEMLGGPSVFIFPPKPKDTLLIARTPEVTCVVVDLGPEDPEVQISWFVDGKQMQTAKTQPREEQFNGTYRVVSVLPIGHQDWLKGKQFTCKVNNKALPSPIERTISKARGQAHQPSVYVLPPSREELSKNTVSLTCLIKDFFPPDIDVEWQSNGQQEPESKYRTTPPQLDEDGSYFLYSKLSVDKSRWQRGDTFICAVMHEALHNHYTQESLSHSPGK

SEQ ID NO: 174 - protein, 220 aa, Artificial Sequence
  Synthetic: Exemplary variant canine IgG-B Fc  Protein A + C1q + CD16   K(97)I
PAPEMLGGPSVFIFPPKPKDTLLIARTPEVTCVVVDLDPEDPEVQISWFVDGKQMQTAKTQPREEQFNGTYRVVSVLPIGHQDWLKGKQFTCKVNNIALPSPIERTISKARGQAHQPSVYVLPPSREELSKNTVSLTCLIKDFFPPDIDVEWQSNGQQEPESKYRTTPPQLDEDGSYFLYSKLSVDKSRWQRGDTFICAVMHEALHNHYTQESLSHSPGK

SEQ ID NO: 175 - protein, 220 aa, Artificial Sequence
  Synthetic: Exemplary variant canine IgG-B Fc  Protein A + C1q + CD16   A(98)G
PAPEMLGGPSVFIFPPKPKDTLLIARTPEVTCVVVDLDPEDPEVQISWFVDGKQMQTAKTQPREEQFNGTYRVVSVLPIGHQDWLKGKQFTCKVNNKGLPSPIERTISKARGQAHQPSVYVLPPSREELSKNTVSLTCLIKDFFPPDIDVEWQSNGQQEPESKYRTTPPQLDEDGSYFLYSKLSVDKSRWQRGDTFICAVMHEALHNHYTQESLSHSPGK

SEQ ID NO: 176 - protein, 220 aa, Artificial Sequence
  Synthetic: Exemplary variant canine IgG-B Fc  Protein A + C1q + CD16  D(38)G  K(97)I A(98)G
PAPEMLGGPSVFIFPPKPKDTLLIARTPEVTCVVVDLGPEDPEVQISWFVDGKQMQTAKTQPREEQFNGTYRVVSVLPIGHQDWLKGKQFTCKVNNIGLPSPIERTISKARGQAHQPSVYVLPPSREELSKNTVSLTCLIKDFFPPDIDVEWQSNGQQEPESKYRTTPPQLDEDGSYFLYSKLSVDKSRWQRGDTFICAVMHEALHNHYTQESLSHSPGK

SEQ ID NO: 177 - protein, 220 aa, Artificial Sequence
  Synthetic: Exemplary variant canine IgG-B Fc  Protein A + C1q CD16  D(38)G  K(93)R K(97)I A(98)G
PAPEMLGGPSVFIFPPKPKDTLLIARTPEVTCVVVDLGPEDPEVQISWFVDGKQMQTAKTQPREEQFNGTYRVVSVLPIGHQDWLKGKQFTCRVNNIGLPSPIERTISKARGQAHQPSVYVLPPSREELSKNTVSLTCLIKDFFPPDIDVEWQSNGQQEPESKYRTTPPQLDEDGSYFLYSKLSVDKSRWQRGDTFICAVMHEALHNHYTQESLSHSPGK

SEQ ID NO: 178 - protein, 220 aa, Artificial Sequence
  Synthetic: Exemplary variant canine IgG-B Fc  Protein A + C1q + CD16   M(5)P P(39)R
PAPEPLGGPSVFIFPPKPKDTLLIARTPEVTCVVVDLDREDPEVQISWFVDGKQMQTAKTQPREEQFNGTYRVVSVLPIGHQDWLKGKQFTCKVNNKALPSPIERTISKARGQAHQPSVYVLPPSREELSKNTVSLTCLIKDFFPPDIDVEWQSNGQQEPESKYRTTPPQLDEDGSYFLYSKLSVDKSRWQRGDTFICAVMHEALHNHYTQESLSHSPGK

SEQ ID NO: 179 - protein, 220 aa, Artificial Sequence
  Synthetic: Exemplary variant canine IgG-B Fc  Protein A + C1q CD16  M(5)P P(39)R K(93)R
PAPEPLGGPSVFIFPPKPKDTLLIARTPEVTCVVVDLDREDPEVQISWFVDGKQMQTAKTQPREEQFNGTYRVVSVLPIGHQDWLKGKQFTCRVNNKALPSPIERTISKARGQAHQPSVYVLPPSREELSKNTVSLTCLIKDFFPPDIDVEWQSNGQQEPESKYRTTPPQLDEDGSYFLYSKLSVDKSRWQRGDTFICAVMHEALHNHYTQESLSHSPGK

SEQ ID NO: 180 - protein, 220 aa, Artificial Sequence
  Synthetic: Exemplary variant canine IgG-C Fc   C1q + Protein A + I(21)T V(23)L T(24)I
PGCGLLGGPSVFIFPPKPKDTLLIARTPTVTCVVVDLDPENPEVQISWFVDSKQVQTANTQPREEQSNGTYRVVSVLPIGHQDWLSGKQFKCKVNNKALPSPIEEIISKTPGQAHQPNVYVLPPSRDEMSKNTVTLTCLVKDFFPPEIDVEWQSNGQQEPESKYRMTPPQLDEDGSYFLYSKLSVDKSRWQRGDTFICAVMHEALHNHYTQISLSHSPGK

SEQ ID NO: 181 - protein, 220 aa, Artificial Sequence
  Synthetic: Exemplary variant canine IgG-C Fc   C1q + Protein A + I(21)T
PGCGLLGGPSVFIFPPKPKDTLVTARTPTVTCVVVDLDPENPEVQISWFVDSKQVQTANTQPREEQSNGTYRVVSVLPIGHQDWLSGKQFKCKVNNKALPSPIEEIISKTPGQAHQPNVYVLPPSRDEMSKNTVTLTCLVKDFFPPEIDVEWQSNGQQEPESKYRMTPPQLDEDGSYFLYSKLSVDKSRWQRGDTFICAVMHEALHNHYTQISLSHSPGK

SEQ ID NO: 182 - protein, 220 aa, Artificial Sequence
  Synthetic: Exemplary variant canine IgG-C Fc  Protein A  C1q K(93)R
PGCGLLGGPSVFIFPPKPKDILVTARTPTVTCVVVDLDPENPEVQISWFVDSKQVQTANTQPREEQSNGTYRVVSVLPIGHQDWLSGKQFKCRVNNKALPSPIEEIISKTPGQAHQPNVYVLPPSRDEMSKNTVTLTCLVKDFFPPEIDVEWQSNGQQEPESKYRMTPPQLDEDGSYFLYSKLSVDKSRWQRGDTFICAVMHEALHNHYTQISLSHSPGK

SEQ ID NO: 183 - protein, 220 aa, Artificial Sequence
  Synthetic: Exemplary variant canine IgG-C Fc   C1q    K(93)R Protein A + I(21)T V(23)L T(24)I
PGCGLLGGPSVFIFPPKPKDTLLIARTPTVTCVVVDLDPENPEVQISWFVDSKQVQTANTQPREEQSNGTYRVVSVLPIGHQDWLSGKQFKCRVNNKALPSPIEEIISKTPGQAHQPNVYVLPPSRDEMSKNTVTLTCLVKDFFPPEIDVEWQSNGQQEPESKYRMTPPQLDEDGSYFLYSKLSVDKSRWQRGDTFICAVMHEALHNHYTQISLSHSPGK

SEQ ID NO: 184 - protein, 220 aa, Artificial Sequence
  Synthetic: Exemplary variant canine IgG-C Fc  Protein A + C1q + CD16   L(5)P
PGCGPLGGPSVFIFPPKPKDILVTARTPTVTCVVVDLDPENPEVQISWFVDSKQVQTANTQPREEQSNGTYRVVSVLPIGHQDWLSGKQFKCKVNNKALPSPIEEIISKTPGQAHQPNVYVLPPSRDEMSKNTVTLTCLVKDFFPPEIDVEWQSNGQQEPESKYRMTPPQLDEDGSYFLYSKLSVDKSRWQRGDTFICAVMHEALHNHYTQISLSHSPGK

SEQ ID NO: 185 - protein, 220 aa, Artificial Sequence
  Synthetic: Exemplary variant canine IgG-C Fc  Protein A + C1q + CD16   P(39)R
PGCGLLGGPSVFIFPPKPKDILVTARTPTVTCVVVDLDRENPEVQISWFVDSKQVQTANTQPREEQSNGTYRVVSVLPIGHQDWLSGKQFKCKVNNKALPSPIEEIISKTPGQAHQPNVYVLPPSRDEMSKNTVTLTCLVKDFFPPEIDVEWQSNGQQEPESKYRMTPPQLDEDGSYFLYSKLSVDKSRWQRGDTFICAVMHEALHNHYTQISLSHSPGK

SEQ ID NO: 186 - protein, 220 aa, Artificial Sequence
  Synthetic: Exemplary variant canine IgG-C Fc  Protein A + C1q + CD16   D(38)G
PGCGLLGGPSVFIFPPKPKDILVTARTPTVTCVVVDLGPENPEVQISWFVDSKQVQTANTQPREEQSNGTYRVVSVLPIGHQDWLSGKQFKCKVNNKALPSPIEEIISKTPGQAHQPNVYVLPPSRDEMSKNTVTLTCLVKDFFPPEIDVEWQSNGQQEPESKYRMTPPQLDEDGSYFLYSKLSVDKSRWQRGDTFICAVMHEALHNHYTQISLSHSPGK

SEQ ID NO: 187 - protein, 220 aa, Artificial Sequence
  Synthetic: Exemplary variant canine IgG-C Fc  Protein A + C1q + CD16   K(97)I
PGCGLLGGPSVFIFPPKPKDILVTARTPTVTCVVVDLDPENPEVQISWFVDSKQVQTANTQPREEQSNGTYRVVSVLPIGHQDWLSGKQFKCKVNNIALPSPIEEIISKTPGQAHQPNVYVLPPSRDEMSKNTVTLTCLVKDFFPPEIDVEWQSNGQQEPESKYRMTPPQLDEDGSYFLYSKLSVDKSRWQRGDTFICAVMHEALHNHYTQISLSHSPGK

SEQ ID NO: 188 - protein, 220 aa, Artificial Sequence
  Synthetic: Exemplary variant canine IgG-C Fc  Protein A + C1q + CD16   A(98)G
PGCGLLGGPSVFIFPPKPKDILVTARTPTVTCVVVDLDPENPEVQISWFVDSKQVQTANTQPREEQSNGTYRVVSVLPIGHQDWLSGKQFKCKVNNKGLPSPIEEIISKTPGQAHQPNVYVLPPSRDEMSKNTVTLTCLVKDFFPPEIDVEWQSNGQQEPESKYRMTPPQLDEDGSYFLYSKLSVDKSRWQRGDTFICAVMHEALHNHYTQISLSHSPGK

SEQ ID NO: 189 - protein, 220 aa, Artificial Sequence
  Synthetic: Exemplary variant canine IgG-C Fc  Protein A + C1q + CD16  D(38)G  K(97)I A(98)G
PGCGLLGGPSVFIFPPKPKDILVTARTPTVTCVVVDLGPENPEVQISWFVDSKQVQTANTQPREEQSNGTYRVVSVLPIGHQDWLSGKQFKCKVNNIGLPSPIEEIISKTPGQAHQPNVYVLPPSRDEMSKNTVTLTCLVKDFFPPEIDVEWQSNGQQEPESKYRMTPPQLDEDGSYFLYSKLSVDKSRWQRGDTFICAVMHEALHNHYTQISLSHSPGK

SEQ ID NO: 190 - protein, 220 aa, Artificial Sequence
  Synthetic: Exemplary variant canine IgG-C Fc  Protein A + C1q CD16  D(38)G  K(93)R K(97)I A(98)G
PGCGLLGGPSVFIFPPKPKDILVTARTPTVTCVVVDLGPENPEVQISWFVDSKQVQTANTQPREEQSNGTYRVVSVLPIGHQDWLSGKQFKCRVNNIGLPSPIEEIISKTPGQAHQPNVYVLPPSRDEMSKNTVTLTCLVKDFFPPEIDVEWQSNGQQEPESKYRMTPPQLDEDGSYFLYSKLSVDKSRWQRGDTFICAVMHEALHNHYTQISLSHSPGK

SEQ ID NO: 191 - protein, 220 aa, Artificial Sequence
  Synthetic: Exemplary variant canine IgG-C Fc  Protein A + C1q + CD16   L(5)P P(39)R
PGCGPLGGPSVFIFPPKPKDILVTARTPTVTCVVVDLDRENPEVQISWFVDSKQVQTANTQPREEQSNGTYRVVSVLPIGHQDWLSGKQFKCKVNNKALPSPIEEIISKTPGQAHQPNVYVLPPSRDEMSKNTVTLTCLVKDFFPPEIDVEWQSNGQQEPESKYRMTPPQLDEDGSYFLYSKLSVDKSRWQRGDTFICAVMHEALHNHYTQISLSHSPGK

SEQ ID NO: 192 - protein, 220 aa, Artificial Sequence
  Synthetic: Exemplary variant canine IgG-C Fc  Protein A + C1q CD16  M(5)P P(39)R K(93)R
PGCGPLGGPSVFIFPPKPKDILVTARTPTVTCVVVDLDRENPEVQISWFVDSKQVQTANTQPREEQSNGTYRVVSVLPIGHQDWLSGKQFKCRVNNKALPSPIEEIISKTPGQAHQPNVYVLPPSRDEMSKNTVTLTCLVKDFFPPEIDVEWQSNGQQEPESKYRMTPPQLDEDGSYFLYSKLSVDKSRWQRGDTFICAVMHEALHNHYTQISLSHSPGK

SEQ ID NO: 193 - protein, 221 aa, Artificial Sequence
  Synthetic: Exemplary variant canine IgG-D Fc   C1q  Protein A + I(21)T R(23)L T(25)A E(80)G Q(207)H
PVPESLGGPSVFIFPPKPKDTLLIARTPEITCVVLDLGREDPEVQISWFVDGKEVHTAKTQPREQQFNSTYRVVSVLPIGHQDWLTGKEFKCRVNHIGLPSPIERTISKARGQAHQPSVYVLPPSPKELSSSDTVTLTCLIKDFFPPEIDVEWQSNGQPEPESKYHTTAPQLDEDGSYFLYSKLSVDKSRWQQGDTFTCAVMHEALHNHYTDLSLSHSPGK

SEQ ID NO: 194 - protein, 221 aa, Artificial Sequence
  Synthetic: Exemplary variant canine IgG-D Fc   C1q  Protein A + I(21)T Q(207)H
PVPESLGGPSVFIFPPKPKDTLRITRTPEITCVVLDLGREDPEVQISWFVDGKEVHTAKTQPREQQFNSTYRVVSVLPIEHQDWLTGKEFKCRVNHIGLPSPIERTISKARGQAHQPSVYVLPPSPKELSSSDTVTLTCLIKDFFPPEIDVEWQSNGQPEPESKYHTTAPQLDEDGSYFLYSKLSVDKSRWQQGDTFTCAVMHEALHNHYTDLSLSHSPGK

SEQ ID NO: 195 - protein, 221 aa, Artificial Sequence
  Synthetic: Exemplary variant canine IgG-A Fc   Bispecific knob T(138)W
PVPEPLGGPSVLIFPPKPKDILRITRTPEVTCVVLDLGREDPEVQISWFVDGKEVHTAKTQSREQQFNGTYRVVSVLPIEHQDWLTGKEFKCRVNHIDLPSPIERTISKARGRAHKPSVYVLPPSPKELSSSDTVSIWCLIKDFYPPDIDVEWQSNGQQEPERKHRMTPPQLDEDGSYFLYSKLSVDKSRWQQGDPFTCAVMHETLQNHYTDLSLSHSPGK

SEQ ID NO: 196 - protein, 220 aa, Artificial Sequence
  Synthetic: Exemplary variant canine IgG-B Fc  Bispecific knob T(137)W
PAPEMLGGPSVFIFPPKPKDTLLIARTPEVTCVVVDLDPEDPEVQISWFVDGKQMQTAKTQPREEQFNGTYRVVSVLPIGHQDWLKGKQFTCKVNNKALPSPIERTISKARGQAHQPSVYVLPPSREELSKNTVSLWCLIKDFFPPDIDVEWQSNGQQEPESKYRTTPPQLDEDGSYFLYSKLSVDKSRWQRGDTFICAVMHEALHNHYTQESLSHSPGK

SEQ ID NO: 197 - protein, 220 aa, Artificial Sequence
  Synthetic: Exemplary variant canine IgG-C Fc   Bispecific knob T(137)W
PGCGLLGGPSVFIFPPKPKDILVTARTPTVTCVVVDLDPENPEVQISWFVDSKQVQTANTQPREEQSNGTYRVVSVLPIGHQDWLSGKQFKCKVNNKALPSPIEEIISKTPGQAHQPNVYVLPPSRDEMSKNTVTLWCLVKDFFPPEIDVEWQSNGQQEPESKYRMTPPQLDEDGSYFLYSKLSVDKSRWQRGDTFICAVMHEALHNHYTQISLSHSPGK

SEQ ID NO: 198 - protein, 221 aa, Artificial Sequence
  Synthetic: Exemplary variant canine IgG-D Fc  Bispecific knob T(138)W
PVPESLGGPSVFIFPPKPKDILRITRTPEITCVVLDLGREDPEVQISWFVDGKEVHTAKTQPREQQFNSTYRVVSVLPIEHQDWLTGKEFKCRVNHIGLPSPIERTISKARGQAHQPSVYVLPPSPKELSSSDTVTLWCLIKDFFPPEIDVEWQSNGQPEPESKYHTTAPQLDEDGSYFLYSKLSVDKSRWQQGDTFTCAVMHEALQNHYTDLSLSHSPGK

SEQ ID NO: 199 - protein, 221 aa, Artificial Sequence
  Synthetic: Exemplary variant canine IgG-A Fc   Bispecific hole T(138)S L(140)A
PVPEPLGGPSVLIFPPKPKDILRITRTPEVTCVVLDLGREDPEVQISWFVDGKEVHTAKTQSREQQFNGTYRVVSVLPIEHQDWLTGKEFKCRVNHIDLPSPIERTISKARGRAHKPSVYVLPPSPKELSSSDTVSISCAIKDFYPPDIDVEWQSNGQQEPERKHRMTPPQLDEDGSYFLYSKLSVDKSRWQQGDPFTCAVMHETLQNHYTDLSLSHSPGK

SEQ ID NO: 200 - protein, 220 aa, Artificial Sequence
  Synthetic: Exemplary variant canine IgG-B Fc  Bispecific hole T(137)S L(139)A
PAPEMLGGPSVFIFPPKPKDTLLIARTPEVTCVVVDLDPEDPEVQISWFVDGKQMQTAKTQPREEQFNGTYRVVSVLPIGHQDWLKGKQFTCKVNNKALPSPIERTISKARGQAHQPSVYVLPPSREELSKNTVSLSCAIKDFFPPDIDVEWQSNGQQEPESKYRTTPPQLDEDGSYFLYSKLSVDKSRWQRGDTFICAVMHEALHNHYTQESLSHSPGK

SEQ ID NO: 201 - protein, 220 aa, Artificial Sequence
  Synthetic: Exemplary variant canine IgG-C Fc  Bispecific hole T(137)S L(139)A
PGCGLLGGPSVFIFPPKPKDILVTARTPTVTCVVVDLDPENPEVQISWFVDSKQVQTANTQPREEQSNGTYRVVSVLPIGHQDWLSGKQFKCKVNNKALPSPIEEIISKTPGQAHQPNVYVLPPSRDEMSKNTVTLSCAVKDFFPPEIDVEWQSNGQQEPESKYRMTPPQLDEDGSYFLYSKLSVDKSRWQRGDTFICAVMHEALHNHYTQISLSHSPGK

SEQ ID NO: 202 - protein, 221 aa, Artificial Sequence
  Synthetic: Exemplary variant canine IgG-D Fc  Bispecific hole T(138)S L(140)A
PVPESLGGPSVFIFPPKPKDILRITRTPEITCVVLDLGREDPEVQISWFVDGKEVHTAKTQPREQQFNSTYRVVSVLPIEHQDWLTGKEFKCRVNHIGLPSPIERTISKARGQAHQPSVYVLPPSPKELSSSDTVTLSCAIKDFFPPEIDVEWQSNGQPEPESKYHTTAPQLDEDGSYFLYSKLSVDKSRWQQGDTFTCAVMHEALQNHYTDLSLSHSPGK

SEQ ID NO: 203 - protein, 237 aa, Artificial Sequence
  Synthetic: Exemplary wild-type feline IgG1a Fc  Protein A + C1q +
RKTDHPPGPKPCDCPKCPPPEMLGGPSIFIFPPKPKDTLSISRTPEVTCLVVDLGPDDSDVQITWFVDNTQVYTAKTSPREEQFNSTYRVVSVLPILHQDWLKGKEFKCKVNSKSLPSPIERTISKAKGQPHEPQVYVLPPAQEELSENKVSVTCLIKSFHPPDIAVEWEITGQPEPENNYRTTPPQLDSDGTYFVYSKLSVDRSHWQRGNTYTCSVSHEALHSHHTQKSLTQSPGK

SEQ ID NO: 204 - protein, 237 aa, Artificial Sequence
  Synthetic: Exemplary wild-type feline IgG1a Fc  Protein A + C1q +
RKTDHPPGPKTGEGPKCPPPEMLGGPSIFIFPPKPKDTLSISRTPEVTCLVVDLGPDDSDVQITWFVDNTQVYTAKTSPREEQFNSTYRVVSVLPILHQDWLKGKEFKCKVNSKSLPSPIERTISKAKGQPHEPQVYVLPPAQEELSENKVSVTCLIKSFHPPDIAVEWEITGQPEPENNYRTTPPQLDSDGTYFVYSKLSVDRSHWQRGNTYTCSVSHEALHSHHTQKSLTQSPGK

SEQ ID NO: 205 - protein, 237 aa, Artificial Sequence
  Synthetic: Exemplary wild-type feline IgG1b Fc  Protein A + C1q +
RKTDHPPGPKPCDCPKCPPPEMLGGPSIFIFPPKPKDTLSISRTPEVTCLVVDLGPDDSDVQITWFVDNTQVYTAKTSPREEQFNSTYRVVSVLPILHQDWLKGKEFKCKVNSKSLPSPIERTISKDKGQPHEPQVYVLPPAQEELSENKVSVTCLIEGFYPSDIAVEWEITGQPEPENNYRTTPPQLDSDGTYFLYSRLSVDRSRWQRGNTYTCSVSHEALHSHHTQKSLTQSPGK

SEQ ID NO: 206 - protein, 237 aa, Artificial Sequence
  Synthetic: Exemplary wild-type feline IgG1b Fc  Protein A + C1q +
RKTDHPPGPKTGEGPKCPPPEMLGGPSIFIFPPKPKDTLSISRTPEVTCLVVDLGPDDSDVQITWFVDNTQVYTAKTSPREEQFNSTYRVVSVLPILHQDWLKGKEFKCKVNSKSLPSPIERTISKDKGQPHEPQVYVLPPAQEELSENKVSVTCLIEGFYPSDIAVEWEITGQPEPENNYRTTPPQLDSDGTYFLYSRLSVDRSRWQRGNTYTCSVSHEALHSHHTQKSLTQSPGK

SEQ ID NO: 207 - protein, 237 aa, Artificial Sequence
  Synthetic: Exemplary wild-type feline IgG2 Fc  Protein A + C1q
PKTASTIESKTGEGPKCPVPEIPGAPSVFIFPPKPKDTLSISRTPEVTCLVVDLGPDDSNVQITWFVDNTEMHTAKTRPREEQFNSTYRVVSVLPILHQDWLKGKEFKCKVNSKSLPSAMERTISKAKGQPHEPQVYVLPPTQEELSENKVSVTCLIKGFHPPDIAVEWEITGQPEPENNYQTTPPQLDSDGTYFLYSRLSVDRSHWQRGNTYTCSVSHEALHSHHTQKSLTQSPGK

SEQ ID NO: 208 - protein, 237 aa, Artificial Sequence
  Synthetic: Exemplary variant feline IgG1a Fc with modified hinge K(16)P
RKTDHPPGPKPCDCPPCPPPEMLGGPSIFIFPPKPKDTLSISRTPEVTCLVVDLGPDDSDVQITWFVDNTQVYTAKTSPREEQFNSTYRVVSVLPILHQDWLKGKEFKCKVNSKSLPSPIERTISKAKGQPHEPQVYVLPPAQEELSENKVSVTCLIKSFHPPDIAVEWEITGQPEPENNYRTTPPQLDSDGTYFVYSKLSVDRSHWQRGNTYTCSVSHEALHSHHTQKSLTQSPGK

SEQ ID NO: 209 - protein, 237 aa, Artificial Sequence; identical to SEQ ID NO: 203
  Synthetic: Exemplary variant feline IgG1a Fc  Protein A + C1q P(198)A

SEQ ID NO: 210 - protein, 237 aa, Artificial Sequence; identical to SEQ ID NO: 204
  Synthetic: Exemplary variant feline IgG1a Fc  Protein A + C1q P(198)A

SEQ ID NO: 211 - protein, 237 aa, Artificial Sequence
  Synthetic: Exemplary variant feline IgG1b Fc with modified hinge K(16)P
RKTDHPPGPKPCDCPPCPPPEMLGGPSIFIFPPKPKDTLSISRTPEVTCLVVDLGPDDSDVQITWFVDNTQVYTAKTSPREEQFNSTYRVVSVLPILHQDWLKGKEFKCKVNSKSLPSPIERTISKDKGQPHEPQVYVLPPAQEELSENKVSVTCLIEGFYPSDIAVEWEITGQPEPENNYRTTPPQLDSDGTYFLYSRLSVDRSRWQRGNTYTCSVSHEALHSHHTQKSLTQSPGK

SEQ ID NO: 212 - protein, 237 aa, Artificial Sequence; identical to SEQ ID NO: 205
  Synthetic: Exemplary variant feline IgG1b Fc  Protein A + C1q P(198)A

SEQ ID NO: 213 - protein, 237 aa, Artificial Sequence; identical to SEQ ID NO: 206
  Synthetic: Exemplary variant feline IgG1b Fc  Protein A + C1q P(198)A

SEQ ID NO: 214 - protein, 237 aa, Artificial Sequence
  Synthetic: Exemplary variant feline IgG2 Fc with modified hinge Hinge Cys G(14)C
PKTASTIESKTGECPKCPVPEIPGAPSVFIFPPKPKDTLSISRTPEVTCLVVDLGPDDSNVQITWFVDNTEMHTAKTRPREEQFNSTYRVVSVLPILHQDWLKGKEFKCKVNSKSLPSAMERTISKAKGQPHEPQVYVLPPTQEELSENKVSVTCLIKGFHPPDIAVEWEITGQPEPENNYQTTPPQLDSDGTYFLYSRLSVDRSHWQRGNTYTCSVSHEALHSHHTQKSLTQSPGK

SEQ ID NO: 215 - protein, 237 aa, Artificial Sequence
  Synthetic: Exemplary variant feline IgG2 Fc with modified hinge K(16)P
PKTASTIESKTGEGPPCPVPEIPGAPSVFIFPPKPKDTLSISRTPEVTCLVVDLGPDDSNVQITWFVDNTEMHTAKTRPREEQFNSTYRVVSVLPILHQDWLKGKEFKCKVNSKSLPSAMERTISKAKGQPHEPQVYVLPPTQEELSENKVSVTCLIKGFHPPDIAVEWEITGQPEPENNYQTTPPQLDSDGTYFLYSRLSVDRSHWQRGNTYTCSVSHEALHSHHTQKSLTQSPGK

SEQ ID NO: 216 - protein, 237 aa, Artificial Sequence
  Synthetic: Exemplary variant feline IgG2 Fc with feline IgG1 hinge
RKTDHPPGPKPCDCPKCPPPEMLGGPSVFIFPPKPKDTLSISRTPEVTCLVVDLGPDDSNVQITWFVDNTEMHTAKTRPREEQFNSTYRVVSVLPILHQDWLKGKEFKCKVNSKSLPSAMERTISKAKGQPHEPQVYVLPPTQEELSENKVSVTCLIKGFHPPDIAVEWEITGQPEPENNYQTTPPQLDSDGTYFLYSRLSVDRSHWQRGNTYTCSVSHEALHSHHTQKSLTQSPGK

SEQ ID NO: 217 - protein, 237 aa, Artificial Sequence
  Synthetic: Exemplary variant feline IgG1a Fc  Bispecific knob T(154)W
RKTDHPPGPKPCDCPKCPPPEMLGGPSIFIFPPKPKDTLSISRTPEVTCLVVDLGPDDSDVQITWFVDNTQVYTAKTSPREEQFNSTYRVVSVLPILHQDWLKGKEFKCKVNSKSLPSPIERTISKAKGQPHEPQVYVLPPAQEELSENKVSVWCLIKSFHPPDIAVEWEITGQPEPENNYRTTPPQLDSDGTYFVYSKLSVDRSHWQRGNTYTCSVSHEALHSHHTQKSLTQSPGK

SEQ ID NO: 218 - protein, 237 aa, Artificial Sequence
  Synthetic: Exemplary variant feline IgG1a Fc  Bispecific knob T(154)W
RKTDHPPGPKTGEGPKCPPPEMLGGPSIFIFPPKPKDTLSISRTPEVTCLVVDLGPDDSDVQITWFVDNTQVYTAKTSPREEQFNSTYRVVSVLPILHQDWLKGKEFKCKVNSKSLPSPIERTISKAKGQPHEPQVYVLPPAQEELSENKVSVWCLIKSFHPPDIAVEWEITGQPEPENNYRTTPPQLDSDGTYFVYSKLSVDRSHWQRGNTYTCSVSHEALHSHHTQKSLTQSPGK

SEQ ID NO: 219 - protein, 237 aa, Artificial Sequence
  Synthetic: Exemplary variant feline IgG1b Fc  Bispecific knob T(154)W
RKTDHPPGPKPCDCPKCPPPEMLGGPSIFIFPPKPKDTLSISRTPEVTCLVVDLGPDDSDVQITWFVDNTQVYTAKTSPREEQFNSTYRVVSVLPILHQDWLKGKEFKCKVNSKSLPSPIERTISKDKGQPHEPQVYVLPPAQEELSENKVSVWCLIEGFYPSDIAVEWEITGQPEPENNYRTTPPQLDSDGTYFLYSRLSVDRSRWQRGNTYTCSVSHEALHSHHTQKSLTQSPGK

SEQ ID NO: 220 - protein, 237 aa, Artificial Sequence
  Synthetic: Exemplary variant feline IgG1b Fc  Bispecific knob T(154)W
RKTDHPPGPKTGEGPKCPPPEMLGGPSIFIFPPKPKDTLSISRTPEVTCLVVDLGPDDSDVQITWFVDNTQVYTAKTSPREEQFNSTYRVVSVLPILHQDWLKGKEFKCKVNSKSLPSPIERTISKDKGQPHEPQVYVLPPAQEELSENKVSVWCLIEGFYPSDIAVEWEITGQPEPENNYRTTPPQLDSDGTYFLYSRLSVDRSRWQRGNTYTCSVSHEALHSHHTQKSLTQSPGK

SEQ ID NO: 221 - protein, 237 aa, Artificial Sequence
  Synthetic: Exemplary variant feline IgG2 Fc  Bispecific knob T(154)W
PKTASTIESKTGEGPKCPVPEIPGAPSVFIFPPKPKDTLSISRTPEVTCLVVDLGPDDSNVQITWFVDNTEMHTAKTRPREEQFNSTYRVVSVLPILHQDWLKGKEFKCKVNSKSLPSAMERTISKAKGQPHEPQVYVLPPTQEELSENKVSVWCLIKGFHPPDIAVEWEITGQPEPENNYQTTPPQLDSDGTYFLYSRLSVDRSHWQRGNTYTCSVSHEALHSHHTQKSLTQSPGK

SEQ ID NO: 222 - protein, 237 aa, Artificial Sequence
  Synthetic: Exemplary variant feline IgG1a Fc  Bispecific hole T(154)S, L(156)A
RKTDHPPGPKPCDCPKCPPPEMLGGPSIFIFPPKPKDTLSISRTPEVTCLVVDLGPDDSDVQITWFVDNTQVYTAKTSPREEQFNSTYRVVSVLPILHQDWLKGKEFKCKVNSKSLPSPIERTISKAKGQPHEPQVYVLPPAQEELSENKVSVSCAIKSFHPPDIAVEWEITGQPEPENNYRTTPPQLDSDGTYFVYSKLSVDRSHWQRGNTYTCSVSHEALHSHHTQKSLTQSPGK

SEQ ID NO: 223 - protein, 237 aa, Artificial Sequence
  Synthetic: Exemplary variant feline IgG1a Fc  Bispecific hole T(154)S, L(156)A
RKTDHPPGPKTGEGPKCPPPEMLGGPSIFIFPPKPKDTLSISRTPEVTCLVVDLGPDDSDVQITWFVDNTQVYTAKTSPREEQFNSTYRVVSVLPILHQDWLKGKEFKCKVNSKSLPSPIERTISKAKGQPHEPQVYVLPPAQEELSENKVSVSCAIKSFHPPDIAVEWEITGQPEPENNYRTTPPQLDSDGTYFVYSKLSVDRSHWQRGNTYTCSVSHEALHSHHTQKSLTQSPGK

SEQ ID NO: 224 - protein, 237 aa, Artificial Sequence
  Synthetic: Exemplary variant feline IgG1b Fc  Bispecific hole T(154)S, L(156)A
RKTDHPPGPKPCDCPKCPPPEMLGGPSIFIFPPKPKDTLSISRTPEVTCLVVDLGPDDSDVQITWFVDNTQVYTAKTSPREEQFNSTYRVVSVLPILHQDWLKGKEFKCKVNSKSLPSPIERTISKDKGQPHEPQVYVLPPAQEELSENKVSVSCAIEGFYPSDIAVEWEITGQPEPENNYRTTPPQLDSDGTYFLYSRLSVDRSRWQRGNTYTCSVSHEALHSHHTQKSLTQSPGK

SEQ ID NO: 225 - protein, 237 aa, Artificial Sequence
  Synthetic: Exemplary variant feline IgG1b Fc  Bispecific hole T(154)S, L(156)A
RKTDHPPGPKTGEGPKCPPPEMLGGPSIFIFPPKPKDTLSISRTPEVTCLVVDLGPDDSDVQITWFVDNTQVYTAKTSPREEQFNSTYRVVSVLPILHQDWLKGKEFKCKVNSKSLPSPIERTISKDKGQPHEPQVYVLPPAQEELSENKVSVSCAIEGFYPSDIAVEWEITGQPEPENNYRTTPPQLDSDGTYFLYSRLSVDRSRWQRGNTYTCSVSHEALHSHHTQKSLTQSPGK

SEQ ID NO: 226 - protein, 237 aa, Artificial Sequence
  Synthetic: Exemplary variant feline IgG2 Fc  Bispecific hole T(154)S, L(156)A
PKTASTIESKTGEGPKCPVPEIPGAPSVFIFPPKPKDTLSISRTPEVTCLVVDLGPDDSNVQITWFVDNTEMHTAKTRPREEQFNSTYRVVSVLPILHQDWLKGKEFKCKVNSKSLPSAMERTISKAKGQPHEPQVYVLPPTQEELSENKVSVSCAIKGFHPPDIAVEWEITGQPEPENNYQTTPPQLDSDGTYFLYSRLSVDRSHWQRGNTYTCSVSHEALHSHHTQKSLTQSPGK

SEQ ID NO: 227 - protein, 98 aa, Artificial Sequence
  Synthetic: Wild-type canine IgG-A CH1
ASTTAPSVFPLAPSCGSTSGSTVALACLVSGYFPEPVTVSWNSGSLTSGVHTFPSVLQSSGLHSLSSMVTVPSSRWPSETFTCNVVHPASNTKVDKPV

SEQ ID NO: 228 - protein, 98 aa, Artificial Sequence
  Synthetic: Wild-type canine IgG-B CH1
ASTTAPSVFPLAPSCGSTSGSTVALACLVSGYFPEPVTVSWNSGSLTSGVHTFPSVLQSSGLYSLSSMVTVPSSRWPSETFTCNVAHPASKTKVDKPV

SEQ ID NO: 229 - protein, 98 aa, Artificial Sequence
  Synthetic: Wild-type canine IgG-C CH1
ASTTAPSVFPLAPSCGSQSGSTVALACLVSGYIPEPVTVSWNSVSLTSGVHTFPSVLQSSGLYSLSSMVTVPSSRWPSETFTCNVAHPATNTKVDKPV

SEQ ID NO: 230 - protein, 98 aa, Artificial Sequence
  Synthetic: Wild-type canine IgG-D CH1
ASTTAPSVFPLAPSCGSTSGSTVALACLVSGYFPEPVTVSWNSGSLTSGVHTFPSVLQSSGLYSLSSTVTVPSSRWPSETFTCNVVHPASNTKVDKPV

SEQ ID NO: 231 - protein, 98 aa, Artificial Sequence
  Synthetic: Variant canine IgG-A CH1  A(24)L S(30)D
ASTTAPSVFPLAPSCGSTSGSTVLLACLVDGYFPEPVTVSWNSGSLTSGVHTFPSVLQSSGLHSLSSMVTVPSSRWPSETFTCNVVHPASNTKVDKPV

SEQ ID NO: 232 - protein, 98 aa, Artificial Sequence
  Synthetic: Variant canine IgG-B CH1  A(24)L S(30)D
ASTTAPSVFPLAPSCGSTSGSTVLLACLVDGYFPEPVTVSWNSGSLTSGVHTFPSVLQSSGLYSLSSMVTVPSSRWPSETFTCNVAHPASKTKVDKPV

SEQ ID NO: 233 - protein, 98 aa, Artificial Sequence
  Synthetic: Variant canine IgG-C CH1  A(24)L S(30)D
ASTTAPSVFPLAPSCGSQSGSTVLLACLVDGYIPEPVTVSWNSVSLTSGVHTFPSVLQSSGLYSLSSMVTVPSSRWPSETFTCNVAHPATNTKVDKPV

SEQ ID NO: 234 - protein, 98 aa, Artificial Sequence
  Synthetic: Variant canine IgG-D CH1  A(24)L S(30)D
ASTTAPSVFPLAPSCGSTSGSTVLLACLVDGYFPEPVTVSWNSGSLTSGVHTFPSVLQSSGLYSLSSTVTVPSSRWPSETFTCNVVHPASNTKVDKPV

SEQ ID NO: 235 - protein, 110 aa, Artificial Sequence
  Synthetic: Wild-type canine kappa constant region
RNDAQPAVYLFQPSPDQLHTGSASVVCLLNSFYPKDINVKWKVDGVIQDTGIQESVTEQDKDSTYSLSSTLTMSSTEYLSHELYSCEITHKSLPSTLIKSFQRSECQRVD

SEQ ID NO: 236 - protein, 110 aa, Artificial Sequence
  Synthetic: Variant canine ? constant region  F(11)A S(22)R
RNDAQPAVYLAQPSPDQLHTGRASVVCLLNSFYPKDINVKWKVDGVIQDTGIQESVTEQDKDSTYSLSSTLTMSSTEYLSHELYSCEITHKSLPSTLIKSFQRSECQRVD

SEQ ID NO: 237 - protein, 98 aa, Artificial Sequence
  Synthetic: Wild-type feline IgG1 CH1
ASTTAPSVFPLAPSCGTTSGATVALACLVSGYFPEPVTVSWNSGALTSGVHTFPAVLQASGLYSLSSMVTVPSSRWLSDTFTCNVAHPPSNTKVDKTV

SEQ ID NO: 238 - protein, 98 aa, Artificial Sequence
  Synthetic: Wild-type feline IgG2 CH1
ASTTASSVFPLAPSCGTTSGATVALACLSLGYFPEPVTVSWNSGALTSGVHTFPSVLQASGLYSLSSMVTVPSSRWLSDTFTCNVAHRPSSTKVDKTV

SEQ ID NO: 239 - protein, 98 aa, Artificial Sequence
  Synthetic: Variant feline IgG1 CH1  A(24)L S(30)D
ASTTAPSVFPLAPSCGTTSGATVLLACLVDGYFPEPVTVSWNSGALTSGVHTFPAVLQASGLYSLSSMVTVPSSRWLSDTFTCNVAHPPSNTKVDKTV

SEQ ID NO: 240 - protein, 98 aa, Artificial Sequence
  Synthetic: Variant feline IgG2 CH1  A(24)L S(29)D
ASTTASSVFPLAPSCGTTSGATVLLACLDLGYFPEPVTVSWNSGALTSGVHTFPSVLQASGLYSLSSMVTVPSSRWLSDTFTCNVAHRPSSTKVDKTV

SEQ ID NO: 241 - protein, 110 aa, Artificial Sequence
  Synthetic: Wild-type feline ? constant region
RSDAQPSVFLFQPSLDELHTGSASIVCILNDFYPKEVNVKWKVDGVVQNKGIQESTTEQNSKDSTYSLSSTLTMSSTEYQSHEKFSCEVTHKSLASTLVKSFNRSECQRE

SEQ ID NO: 242 - protein, 110 aa, Artificial Sequence
  Synthetic: Variant feline ? constant region  F(11)A S(22)R
RSDAQPSVFLAQPSLDELHTGRASIVCILNDFYPKEVNVKWKVDGVVQNKGIQESTTEQNSKDSTYSLSSTLTMSSTEYQSHEKFSCEVTHKSLASTLVKSFNRSECQRE

SEQ ID NO: 243 - protein, 451 aa, Artificial Sequence
  Synthetic: Caninized Clone I variable HC v2 and variant canine IgG-B Fc  C1q  CD16  Bispecific Knob  Variant CH1
EVQLVQSGAEVKKPGASVKVSCKASGYTFTSYVMHWVRQAPGQGLEWMGYINPNNDGTFYNGKFQGRVTLTADTSTSTAYMELSSLRAGDIAVYYCAAFYYGFAYWGQGTLVTVSSASTTAPSVFPLAPSCGSTSGSTVLLACLVDGYFPEPVTVSWNSGSLTSGVHTFPSVLQSSGLYSLSSMVTVPSSRWPSETFTCNVAHPASKTKVDKPVPKRENGRVPRPPDCPKCPAPEPLGGPSVFIFPPKPKDTLLIARTPEVTCVVVDLDREDPEVQISWFVDGKQMQTAKTQPREEQFNGTYRVVSVLPIGHQDWLKGKQFTCRVNNKALPSPIERTISKARGQAHQPSVYVLPPSREELSKNTVTLWCLIKDFFPPDIDVEWQSNGQQEPESKYRTTPPQLDEDGSYFLYSKLSVDKSRWQRGDTFICAVMHEALHNHYTQESLSHSPGK

SEQ ID NO: 244 - protein, 217 aa, Artificial Sequence
  Synthetic: Caninized Clone I variable LC v2 and variant canine ? constant region
DIVMTQTPLSLSVSPGETASISCRASQEISGYLSWLQQKPGGTIKRLIYAASNRDTGVPDRFSGSGSGTDFTLRISRVEADDTGVYYCLQYASYPWTFGGGTKVELKRNDAQPAVYLAQPSPDQLHTGRASVVCLLNSFYPKDINVKWKVDGVIQDTGIQESVTEQDKDSTYSLSSTLTMSSTEYLSHELYSCEITHKSLPSTLIKSFQRSECQRVD

SEQ ID NO: 245 - protein, 453 aa, Artificial Sequence
  Synthetic: Caninized anti-canine IL31 Clone M14 variable HC and variant canine IgG-B Fc  C1q  CD16  Bispecific Hole
EVQLVESGPSLVKPGGSLRLTCSVTGDSITSGYWNWIRKFPGNKLEYMGYISYSGITDYNPSLKSRITISRDTSKNQYYLQLNSVTTEDTATYYCARYGNYGYAMDYWGQGTLVTVSSASTTAPSVFPLAPSCGSTSGSTVALACLVSGYFPEPVTVSWNSGSLTSGVHTFPSVLQSSGLYSLSSMVTVPSSRWPSETFTCNVAHPASKTKVDKPVPKRENGRVPRPPDCPKCPAPEPLGGPSVFIFPPKPKDTLLIARTPEVTCVVVDLDREDPEVQISWFVDGKQMQTAKTQPREEQFNGTYRVVSVLPIGHQDWLKGKQFTCRVNNKALPSPIERTISKARGQAHQPSVYVLPPSREELSKNTVTLSCAIKDFFPPDIDVEWQSNGQQEPESKYRTTPPQLDEDGSYFLYSKLSVDKSRWQRGDTFICAVMHEALHNHYTQESLSHSPGK

SEQ ID NO: 246 - protein, 221 aa, Artificial Sequence
  Synthetic: Caninized anti-canine IL31 Clone M14 variable LC and canine ? constant region
DIVMTQSPASLSVSLGQRATISCRASESVDTYGNSFMHWYQQKPGQSPKLLIYRASNLESGIPARFGGSGSGTDFTLTIDPVQADDVATYYCQQSYEDPWTFGGGTKLEIKRNDAQPAVYLFQPSPDQLHTGSASVVCLLNSFYPKDINVKWKVDGVIQDTGIQESVTEQDKDSTYSLSSTLTMSSTEYLSHELYSCEITHKSLPSTLIKSFQRSECQRVD

SEQ ID NO: 247 - protein, 213 aa, Artificial Sequence
  Synthetic: Exemplary wild-type equine IgG1 Fc
GPSVFIFPPNPKDTLMITRTPEVTCVVVDVSQENPDVKFNWYMDGVEVRTATTRPKEEQFNSTYRVVSVLRIQHQDWLSGKEFKCKVNNQALPQPIERTITKTKGRSQEPQVYVLAPHPDELSKSKVSVTCLVKDFYPPEINIEWQSNGQPELETKYSTTQAQQDSDGSYFLYSKLSVDRNRWQQGTTFTCGVMHEALHNHYTQKNVSKNPGK

SEQ ID NO: 248 - protein, 213 aa, Artificial Sequence
  Synthetic: Exemplary wild-type equine IgG2 Fc
GPSVFIFPPNPKDALMISRTPVVTCVVVNLSDQYPDVQFSWYVDNTEVHSAITKQREAQFNSTYRVVSVLPIQHQDWLSGKEFKCSVTNVGVPQPISRAISRGKGPSRVPQVYVLPPHPDELAKSKVSVTCLVKDFYPPDISVEWQSNRWPELEGKYSTTPAQLDGDGSYFLYSKLSLETSRWQQVESFTCAVMHEALHNHFTKTDISESLGK

SEQ ID NO: 249 - protein, 213 aa, Artificial Sequence
  Synthetic: Exemplary wild-type equine IgG3 Fc
GPSVFIFPPKPKDVLMITRMPEVTCLVVDVSHDSSDVLFTWYVDGTEVKTAKTMPNEEQNNSTYRVVSVLRIQHQDWLNGKKFKCKVNNQALPAPVERTISKATGQTRVPQVYVLAPHPDELSKNKVSVTCLVKDFYPPDITVEWQSNEHPEPEGKYRTTEAQKDSDGSYFLYSKLTVEKDRWQQGTTFTCVVMHEALHNHVMQKNISKNPGK

SEQ ID NO: 250 - protein, 213 aa, Artificial Sequence
  Synthetic: Exemplary wild-type equine IgG4 Fc
GPSVFIFPPKPKDVLMISRTPTVTCVVVDVGHDFPDVQFNWYVDGVETHTATTEPKQEQFNSTYRVVSVLPIQHKDWLSGKEFKCKVNNKALPAPVERTISAPTGQPREPQVYVLAPHRDELSKNKVSVTCLVKDFYPPDIDIEWKSNGQPEPETKYSTTPAQLDSDGSYFLYSKLTVETNRWQQGTTFTCAVMHEALHNHYTEKSVSKSPGK

SEQ ID NO: 251 - protein, 213 aa, Artificial Sequence
  Synthetic: Exemplary wild-type equine IgG5 Fc
GPSVFIFPPKPKDVLMISRKPEVTCVVVDLGHDDPDVQFTWFVDGVETHTATTEPKEEQFNSTYRVVSVLPIQHQDWLSGKEFKCSVTSKALPAPVERTISKAKGQLRVPQVYVLAPHPDELAKNTVSVTCLVKDFYPPEIDVEWQSNEHPEPEGKYSTTPAQLNSDGSYFLYSKLSVETSRWKQGESFTCGVMHEAVENHYTQKNVSHSPGK

SEQ ID NO: 252 - protein, 214 aa, Artificial Sequence
  Synthetic: Exemplary wild-type equine IgG6 Fc
GRPSVFIFPPNPKDTLMISRTPEVTCVVVDVSQENPDVKFNWYVDGVEAHTATTKAKEKQDNSTYRVVSVLPIQHQDWRRGKEFKCKVNNRALPAPVERTITKAKGELQDPKVYILAPHREEVTKNTVSVTCLVKDFYPPDINVEWQSNEEPEPEVKYSTTPAQLDGDGSYFLYSKLTVETDRWEQGESFTCVVMHEAIRHTYRQKSITNFPGK

SEQ ID NO: 253 - protein, 213 aa, Artificial Sequence
  Synthetic: Exemplary wild-type equine IgG7 Fc
GPSVFIFPPKPKDVLMISRTPTVTCVVVDVGHDFPDVQFNWYVDGVETHTATTEPKQEQNNSTYRVVSILAIQHKDWLSGKEFKCKVNNQALPAPVQKTISKPTGQPREPQVYVLAPHPDELSKNKVSVTCLVKDFYPPDIDIEWKSNGQPEPETKYSTTPAQLDGDGSYFLYSKLTVETNRWQQGTTFTCAVMHEALHNHYTEKSVSKSPGK

SEQ ID NO: 254 - protein, 213 aa, Artificial Sequence
  Synthetic: Exemplary variant equine IgG1 Fc  Bispecific knob T(130)W
GPSVFIFPPNPKDTLMITRTPEVTCVVVDVSQENPDVKFNWYMDGVEVRTATTRPKEEQFNSTYRVVSVLRIQHQDWLSGKEFKCKVNNQALPQPIERTITKTKGRSQEPQVYVLAPHPDELSKSKVSVWCLVKDFYPPEINIEWQSNGQPELETKYSTTQAQQDSDGSYFLYSKLSVDRNRWQQGTTFTCGVMHEALHNHYTQKNVSKNPGK

SEQ ID NO: 255 - protein, 213 aa, Artificial Sequence
  Synthetic: Exemplary variant equine IgG2 Fc  Bispecific knob T(130)W
GPSVFIFPPNPKDALMISRTPVVTCVVVNLSDQYPDVQFSWYVDNTEVHSAITKQREAQFNSTYRVVSVLPIQHQDWLSGKEFKCSVTNVGVPQPISRAISRGKGPSRVPQVYVLPPHPDELAKSKVSVWCLVKDFYPPDISVEWQSNRWPELEGKYSTTPAQLDGDGSYFLYSKLSLETSRWQQVESFTCAVMHEALHNHFTKTDISESLGK

SEQ ID NO: 256 - protein, 213 aa, Artificial Sequence
  Synthetic: Exemplary variant equine IgG3 Fc  Bispecific knob T(130)W
GPSVFIFPPKPKDVLMITRMPEVTCLVVDVSHDSSDVLFTWYVDGTEVKTAKTMPNEEQNNSTYRVVSVLRIQHQDWLNGKKFKCKVNNQALPAPVERTISKATGQTRVPQVYVLAPHPDELSKNKVSVWCLVKDFYPPDITVEWQSNEHPEPEGKYRTTEAQKDSDGSYFLYSKLTVEKDRWQQGTTFTCVVMHEALHNHVMQKNISKNPGK

SEQ ID NO: 257 - protein, 213 aa, Artificial Sequence
  Synthetic: Exemplary variant equine IgG4 Fc  Bispecific knob T(130)W
GPSVFIFPPKPKDVLMISRTPTVTCVVVDVGHDFPDVQFNWYVDGVETHTATTEPKQEQFNSTYRVVSVLPIQHKDWLSGKEFKCKVNNKALPAPVERTISAPTGQPREPQVYVLAPHRDELSKNKVSVWCLVKDFYPPDIDIEWKSNGQPEPETKYSTTPAQLDSDGSYFLYSKLTVETNRWQQGTTFTCAVMHEALHNHYTEKSVSKSPGK

SEQ ID NO: 258 - protein, 213 aa, Artificial Sequence
  Synthetic: Exemplary variant equine IgG5 Fc  Bispecific knob T(130)W
GPSVFIFPPKPKDVLMISRKPEVTCVVVDLGHDDPDVQFTWFVDGVETHTATTEPKEEQFNSTYRVVSVLPIQHQDWLSGKEFKCSVTSKALPAPVERTISKAKGQLRVPQVYVLAPHPDELAKNTVSVWCLVKDFYPPEIDVEWQSNEHPEPEGKYSTTPAQLNSDGSYFLYSKLSVETSRWKQGESFTCGVMHEAVENHYTQKNVSHSPGK

SEQ ID NO: 259 - protein, 213 aa, Artificial Sequence
  Synthetic: Exemplary variant equine IgG6 Fc  Bispecific knob T(130)W
RPSVFIFPPNPKDTLMISRTPEVTCVVVDVSQENPDVKFNWYVDGVEAHTATTKAKEKQDNSTYRVVSVLPIQHQDWRRGKEFKCKVNNRALPAPVERTITKAKGELQDPKVYILAPHREEVTKNTVSVWCLVKDFYPPDINVEWQSNEEPEPEVKYSTTPAQLDGDGSYFLYSKLTVETDRWEQGESFTCVVMHEAIRHTYRQKSITNFPGK

SEQ ID NO: 260 - protein, 213 aa, Artificial Sequence
  Synthetic: Exemplary variant equine IgG7 Fc  Bispecific knob T(130)W
GPSVFIFPPKPKDVLMISRTPTVTCVVVDVGHDFPDVQFNWYVDGVETHTATTEPKQEQNNSTYRVVSILAIQHKDWLSGKEFKCKVNNQALPAPVQKTISKPTGQPREPQVYVLAPHPDELSKNKVSVWCLVKDFYPPDIDIEWKSNGQPEPETKYSTTPAQLDGDGSYFLYSKLTVETNRWQQGTTFTCAVMHEALHNHYTEKSVSKSPGK

SEQ ID NO: 261 - protein, 213 aa, Artificial Sequence
  Synthetic: Exemplary variant equine IgG1 Fc  Bispecific hole T(130)S L(132)A
GPSVFIFPPNPKDTLMITRTPEVTCVVVDVSQENPDVKFNWYMDGVEVRTATTRPKEEQFNSTYRVVSVLRIQHQDWLSGKEFKCKVNNQALPQPIERTITKTKGRSQEPQVYVLAPHPDELSKSKVSVSCAVKDFYPPEINIEWQSNGQPELETKYSTTQAQQDSDGSYFLYSKLSVDRNRWQQGTTFTCGVMHEALHNHYTQKNVSKNPGK

SEQ ID NO: 262 - protein, 213 aa, Artificial Sequence
  Synthetic: Exemplary variant equine IgG2 Fc  Bispecific hole T(130)S L(132)A
GPSVFIFPPNPKDALMISRTPVVTCVVVNLSDQYPDVQFSWYVDNTEVHSAITKQREAQFNSTYRVVSVLPIQHQDWLSGKEFKCSVTNVGVPQPISRAISRGKGPSRVPQVYVLPPHPDELAKSKVSVSCAVKDFYPPDISVEWQSNRWPELEGKYSTTPAQLDGDGSYFLYSKLSLETSRWQQVESFTCAVMHEALHNHFTKTDISESLGK

SEQ ID NO: 263 - protein, 213 aa, Artificial Sequence
  Synthetic: Exemplary variant equine IgG3 Fc  Bispecific hole T(130)S L(132)A
GPSVFIFPPKPKDVLMITRMPEVTCLVVDVSHDSSDVLFTWYVDGTEVKTAKTMPNEEQNNSTYRVVSVLRIQHQDWLNGKKFKCKVNNQALPAPVERTISKATGQTRVPQVYVLAPHPDELSKNKVSVSCAVKDFYPPDITVEWQSNEHPEPEGKYRTTEAQKDSDGSYFLYSKLTVEKDRWQQGTTFTCVVMHEALHNHVMQKNISKNPGK

SEQ ID NO: 264 - protein, 213 aa, Artificial Sequence
  Synthetic: Exemplary variant equine IgG4 Fc  Bispecific hole T(130)S L(132)A
GPSVFIFPPKPKDVLMISRTPTVTCVVVDVGHDFPDVQFNWYVDGVETHTATTEPKQEQFNSTYRVVSVLPIQHKDWLSGKEFKCKVNNKALPAPVERTISAPTGQPREPQVYVLAPHRDELSKNKVSVSCAVKDFYPPDIDIEWKSNGQPEPETKYSTTPAQLDSDGSYFLYSKLTVETNRWQQGTTFTCAVMHEALHNHYTEKSVSKSPGK

SEQ ID NO: 265 - protein, 213 aa, Artificial Sequence
  Synthetic: Exemplary variant equine IgG5 Fc  Bispecific hole T(130)S L(132)A
GPSVFIFPPKPKDVLMISRKPEVTCVVVDLGHDDPDVQFTWFVDGVETHTATTEPKEEQFNSTYRVVSVLPIQHQDWLSGKEFKCSVTSKALPAPVERTISKAKGQLRVPQVYVLAPHPDELAKNTVSVSCAVKDFYPPEIDVEWQSNEHPEPEGKYSTTPAQLNSDGSYFLYSKLSVETSRWKQGESFTCGVMHEAVENHYTQKNVSHSPGK

SEQ ID NO: 266 - protein, 213 aa, Artificial Sequence
  Synthetic: Exemplary variant equine IgG6 Fc  Bispecific hole T(130)S L(132)A
RPSVFIFPPNPKDTLMISRTPEVTCVVVDVSQENPDVKFNWYVDGVEAHTATTKAKEKQDNSTYRVVSVLPIQHQDWRRGKEFKCKVNNRALPAPVERTITKAKGELQDPKVYILAPHREEVTKNTVSVSCAVKDFYPPDINVEWQSNEEPEPEVKYSTTPAQLDGDGSYFLYSKLTVETDRWEQGESFTCVVMHEAIRHTYRQKSITNFPGK

SEQ ID NO: 267 - protein, 213 aa, Artificial Sequence
  Synthetic: Exemplary variant equine IgG7 Fc  Bispecific hole T(130)S L(132)A
GPSVFIFPPKPKDVLMISRTPTVTCVVVDVGHDFPDVQFNWYVDGVETHTATTEPKQEQNNSTYRVVSILAIQHKDWLSGKEFKCKVNNQALPAPVQKTISKPTGQPREPQVYVLAPHPDELSKNKVSVSCAVKDFYPPDIDIEWKSNGQPEPETKYSTTPAQLDGDGSYFLYSKLTVETNRWQQGTTFTCAVMHEALHNHYTEKSVSKSPGK

SEQ ID NO: 268 - protein, 9 aa, Artificial Sequence
  Synthetic: Alternative CDR-H2
  misc_feature (5)..(5): X is K or A
YINPXNDGT

SEQ ID NO: 269 - protein, 9 aa, Artificial Sequence
  Synthetic: Alternative Clone B CDR-H2
YINPKNDGT

SEQ ID NO: 270 - protein, 40 aa, Artificial Sequence
  Synthetic: Alternative Clone B  HC-FR3
FYNGKFKGKATLTSDKSSSTAYMELSSLTSEDSAVYYCAA

SEQ ID NO: 271 - protein, 17 aa, Artificial Sequence
  Synthetic: Alternative Clone I CDR-H2
YINPNNDGTFYNGKFQG

SEQ ID NO: 272 - protein, 9 aa, Artificial Sequence
  Synthetic: Alternative Clone I CDR-H2
YINPNNDGT

SEQ ID NO: 273 - protein, 40 aa, Artificial Sequence; identical to SEQ ID NO: 270
  Synthetic: Alternative Clone I HC-FR3

SEQ ID NO: 274 - protein, 116 aa, Artificial Sequence
  Synthetic: Caninized Clone I variable HC v3
EVQLVQSAAEVKKPGASVKVSCKASGYTFTSYVMHWVRQAPGQGLEWIGYINPNNDGTFYNGKFQGRVTLTADTSTGTTYTELSSLRAEDTAVYYCAAFYYGFAYWGQGTLVTVSS

SEQ ID NO: 275 - protein, 107 aa, Artificial Sequence
  Synthetic: Caninized Clone I variable LC v3
DIVMTQTPLSLSVSPGETASISCRASQEISGYLSWLQQKPDGTIKRLIYAASTLDSGVPDRFSGSGSGTDFTLRISRVEADDTGVYYCLQYASYPWTFGAGTKVELK

SEQ ID NO: 276 - protein, 451 aa, Artificial Sequence
  Synthetic: Caninized Clone I variable HC v3 and  variant canine IgG-B  C1q , CD16
EVQLVQSAAEVKKPGASVKVSCKASGYTFTSYVMHWVRQAPGQGLEWIGYINPNNDGTFYNGKFQGRVTLTADTSTGTTYTELSSLRAEDTAVYYCAAFYYGFAYWGQGTLVTVSSASTTAPSVFPLAPSCGSTSGSTVALACLVSGYFPEPVTVSWNSGSLTSGVHTFPSVLQSSGLYSLSSMVTVPSSRWPSETFTCNVAHPASKTKVDKPVPKRENGRVPRPPDCPKCPAPEPLGGPSVFIFPPKPKDTLLIARTPEVTCVVVDLDREDPEVQISWFVDGKQMQTAKTQPREEQFNGTYRVVSVLPIGHQDWLKGKQFTCRVNNKALPSPIERTISKARGQAHQPSVYVLPPSREELSKNTVSLTCLIKDFFPPDIDVEWQSNGQQEPESKYRTTPPQLDEDGSYFLYSKLSVDKSRWQRGDTFICAVMHEALHNHYTQESLSHSPGK

SEQ ID NO: 277 - protein, 217 aa, Artificial Sequence
  Synthetic: Caninized Clone I variable LC v3 and canine ? light constant region
DIVMTQTPLSLSVSPGETASISCRASQEISGYLSWLQQKPDGTIKRLIYAASTLDSGVPDRFSGSGSGTDFTLRISRVEADDTGVYYCLQYASYPWTFGAGTKVELKRNDAQPAVYLFQPSPDQLHTGSASVVCLLNSFYPKDINVKWKVDGVIQDTGIQESVTEQDKDSTYSLSSTLTMSSTEYLSHELYSCEITHKSLPSTLIKSFQRSECQRVD

SEQ ID NO: 278 - protein, 13 aa, Artificial Sequence
  Synthetic: Clone M3 CDR-H1
TVSGFSLSRYSVH

SEQ ID NO: 279 - protein, 9 aa, Artificial Sequence
  Synthetic: Clone M3 CDR-H2
GMIWGGGST

SEQ ID NO: 280 - protein, 9 aa, Artificial Sequence
  Synthetic: Clone M3 CDR-H3
TYRGYALDY

SEQ ID NO: 281 - protein, 22 aa, Artificial Sequence
  Synthetic: Clone M3 HC-FR1
QVQLKESGPGLVAPSQSLSITC

SEQ ID NO: 282 - protein, 13 aa, Artificial Sequence
  Synthetic: Clone M3 HC-FR2
WVRQPPGKGLEWL

SEQ ID NO: 283 - protein, 40 aa, Artificial Sequence
  Synthetic: Clone M3 HC-FR3
DYNSVFKSRLSISKDNSKSQVFLKMNSLQTDDTAMYYCAR

SEQ ID NO: 284 - protein, 11 aa, Artificial Sequence
  Synthetic: Clone M3 HC-FR4
WGQGTSVTVSS

SEQ ID NO: 285 - protein, 11 aa, Artificial Sequence
  Synthetic: Clone M3 CDR-L1
RASQDISNYLN

SEQ ID NO: 286 - protein, 8 aa, Artificial Sequence
  Synthetic: Clone M3 CDR-L2
YYTSRLQS

SEQ ID NO: 287 - protein, 9 aa, Artificial Sequence
  Synthetic: Clone M3 CDR-L3
QQANTLPLT

SEQ ID NO: 288 - protein, 23 aa, Artificial Sequence
  Synthetic: Clone M3 LC-FR1
DIQMTQTTSSLSASLGDRVTISC

SEQ ID NO: 289 - protein, 14 aa, Artificial Sequence
  Synthetic: Clone M3 LC-FR2
WYQQKPDGTVKLLI

SEQ ID NO: 290 - protein, 32 aa, Artificial Sequence
  Synthetic: Clone M3 LC-FR3
GVPSRFSGSGSGTDYCLTISNLEQEDIATYFC

SEQ ID NO: 291 - protein, 10 aa, Artificial Sequence
  Synthetic: Clone M3 LC-FR4
FGSGTKLELK

SEQ ID NO: 292 - protein, 117 aa, Artificial Sequence
  Synthetic: Clone M3 variable HC
QVQLKESGPGLVAPSQSLSITCTVSGFSLSRYSVHWVRQPPGKGLEWLGMIWGGGSTDYNSVFKSRLSISKDNSKSQVFLKMNSLQTDDTAMYYCARTYRGYALDYWGQGTSVTVSS

SEQ ID NO: 293 - protein, 107 aa, Artificial Sequence
  Synthetic: Clone M3 variable LC
DIQMTQTTSSLSASLGDRVTISCRASQDISNYLNWYQQKPDGTVKLLIYYTSRLQSGVPSRFSGSGSGTDYCLTISNLEQEDIATYFCQQANTLPLTFGSGTKLELK

SEQ ID NO: 294 - protein, 13 aa, Artificial Sequence
  Synthetic: Clone M5 CDR-H1
TVSGFSLSRYSVH

SEQ ID NO: 295 - protein, 9 aa, Artificial Sequence
  Synthetic: Clone M5 CDR-H2
GMIWGGGST

SEQ ID NO: 296 - protein, 9 aa, Artificial Sequence
  Synthetic: Clone M5 CDR-H3
TYRGYALDY

SEQ ID NO: 297 - protein, 22 aa, Artificial Sequence
  Synthetic: Clone M5 HC-FR1
QVQLKESGPGLVAPSQSLSITC

SEQ ID NO: 298 - protein, 13 aa, Artificial Sequence
  Synthetic: Clone M5 HC-FR2
WVRQPPGKGLEWL

SEQ ID NO: 299 - protein, 40 aa, Artificial Sequence; identical to SEQ ID NO: 283
  Synthetic: Clone M5 HC-FR3

SEQ ID NO: 300 - protein, 11 aa, Artificial Sequence
  Synthetic: Clone M5 HC-FR4
WGQGTSVTVSS

SEQ ID NO: 301 - protein, 11 aa, Artificial Sequence
  Synthetic: Clone M5 CDR-L1
RASQDISNYLN

SEQ ID NO: 302 - protein, 8 aa, Artificial Sequence
  Synthetic: Clone M5 CDR-L2
YYTSRLQS

SEQ ID NO: 303 - protein, 9 aa, Artificial Sequence
  Synthetic: Clone M5 CDR-L3
QQANTLPLT

SEQ ID NO: 304 - protein, 23 aa, Artificial Sequence
  Synthetic: Clone M5 LC-FR1
DIQMTQTTSSLSASLGDRVTISC

SEQ ID NO: 305 - protein, 14 aa, Artificial Sequence
  Synthetic: Clone M5 LC-FR2
WYQQKPDGTVKLLI

SEQ ID NO: 306 - protein, 32 aa, Artificial Sequence; identical to SEQ ID NO: 290
  Synthetic: Clone M5 LC-FR3

SEQ ID NO: 307 - protein, 10 aa, Artificial Sequence
  Synthetic: Clone M5 LC-FR4
FGSGTKLELK

SEQ ID NO: 308 - protein, 117 aa, Artificial Sequence; identical to SEQ ID NO: 292
  Synthetic: Clone M5 variable HC

SEQ ID NO: 309 - protein, 107 aa, Artificial Sequence; identical to SEQ ID NO: 293
  Synthetic: Clone M5 variable LC

SEQ ID NO: 310 - protein, 13 aa, Artificial Sequence
  Synthetic: Clone M8 CDR-H1
KASGYTFTSYDIN

SEQ ID NO: 311 - protein, 11 aa, Artificial Sequence
  Synthetic: Clone M8 CDR-H2
GWIYPGDGSTK

SEQ ID NO: 312 - protein, 5 aa, Artificial Sequence
  Synthetic: Clone M8 CDR-H3
SSFVV

SEQ ID NO: 313 - protein, 22 aa, Artificial Sequence
  Synthetic: Clone M8 HC-FR1
QVQLQQSGPELVKPGALVKISC

SEQ ID NO: 314 - protein, 13 aa, Artificial Sequence
  Synthetic: Clone M8 HC-FR2
WVKQRPGQGLEWI

SEQ ID NO: 315 - protein, 39 aa, Artificial Sequence
  Synthetic: Clone M8 HC-FR3
YNEKFKGKATLTADKSSSTAYMQLSSLTSEDSAVYFCAR

SEQ ID NO: 316 - protein, 11 aa, Artificial Sequence
  Synthetic: Clone M8 HC-FR4
WGAGTTVTVSS

SEQ ID NO: 317 - protein, 11 aa, Artificial Sequence
  Synthetic: Clone M8 CDR-L1
KASDPINNWLA

SEQ ID NO: 318 - protein, 8 aa, Artificial Sequence
  Synthetic: Clone M8 CDR-L2
SGATSLET

SEQ ID NO: 319 - protein, 9 aa, Artificial Sequence
  Synthetic: Clone M8 CDR-L3
HQYWSIPYT

SEQ ID NO: 320 - protein, 23 aa, Artificial Sequence
  Synthetic: Clone M8 LC-FR1
DIQMTQSSSYLSVSLGGRVTITC

SEQ ID NO: 321 - protein, 14 aa, Artificial Sequence
  Synthetic: Clone M8 LC-FR2
WYQQKPGNAPRLLI

SEQ ID NO: 322 - protein, 32 aa, Artificial Sequence
  Synthetic: Clone M8 LC-FR3
GVPSRISGSGSGKDYSLSITSLQTEDIATYYC

SEQ ID NO: 323 - protein, 10 aa, Artificial Sequence
  Synthetic: Clone M8 LC-FR4
FGGGTKLEIK

SEQ ID NO: 324 - protein, 114 aa, Artificial Sequence
  Synthetic: Clone M8 variable HC
QVQLQQSGPELVKPGALVKISCKASGYTFTSYDINWVKQRPGQGLEWIGWIYPGDGSTKYNEKFKGKATLTADKSSSTAYMQLSSLTSEDSAVYFCARSSFVVWGAGTTVTVSS

SEQ ID NO: 325 - protein, 107 aa, Artificial Sequence
  Synthetic: Clone M8 variable LC
DIQMTQSSSYLSVSLGGRVTITCKASDPINNWLAWYQQKPGNAPRLLISGATSLETGVPSRISGSGSGKDYSLSITSLQTEDIATYYCHQYWSIPYTFGGGTKLEIK

SEQ ID NO: 326 - protein, 13 aa, Artificial Sequence
  Synthetic: Clone M9 CDR-H1
AASGFTFSSFGMH

SEQ ID NO: 327 - protein, 11 aa, Artificial Sequence
  Synthetic: Clone M9 CDR-H2
AYIRSDSSTIY

SEQ ID NO: 328 - protein, 11 aa, Artificial Sequence
  Synthetic: Clone M9 CDR-H3
SGYYGSFSLTY

SEQ ID NO: 329 - protein, 22 aa, Artificial Sequence
  Synthetic: Clone M9 HC-FR1
DVQLVESGGGLVQPGGSRKLSC

SEQ ID NO: 330 - protein, 13 aa, Artificial Sequence
  Synthetic: Clone M9 HC-FR2
WVRQAPEKGLEWV

SEQ ID NO: 331 - protein, 39 aa, Artificial Sequence
  Synthetic: Clone M9 HC-FR3
YADTVKGRFTISRDNPKNTLFLQMTSLRSEDTAMYYCAR

SEQ ID NO: 332 - protein, 11 aa, Artificial Sequence
  Synthetic: Clone M9 HC-FR4
WGQGTLVTVSA

SEQ ID NO: 333 - protein, 12 aa, Artificial Sequence
  Synthetic: Clone M9 CDR-L1
SASSSVSSNYLH

SEQ ID NO: 334 - protein, 8 aa, Artificial Sequence
  Synthetic: Clone M9 CDR-L2
YRTSNLPS

SEQ ID NO: 335 - protein, 8 aa, Artificial Sequence
  Synthetic: Clone M9 CDR-L3
QQGSGMLT

SEQ ID NO: 336 - protein, 23 aa, Artificial Sequence
  Synthetic: Clone M9 LC-FR1
EIVLTQSPTTMAASPGEKITITC

SEQ ID NO: 337 - protein, 14 aa, Artificial Sequence
  Synthetic: Clone M9 LC-FR2
WYQQKPGFSPKLLI

SEQ ID NO: 338 - protein, 32 aa, Artificial Sequence
  Synthetic: Clone M9 LC-FR3
GVPARFFGSGSGTSYSLTIGTMEAEDVATYYC

SEQ ID NO: 339 - protein, 10 aa, Artificial Sequence
  Synthetic: Clone M9 LC-FR4
FGAGTKLELK

SEQ ID NO: 340 - protein, 120 aa, Artificial Sequence
  Synthetic: Clone M9 variable HC
DVQLVESGGGLVQPGGSRKLSCAASGFTFSSFGMHWVRQAPEKGLEWVAYIRSDSSTIYYADTVKGRFTISRDNPKNTLFLQMTSLRSEDTAMYYCARSGYYGSFSLTYWGQGTLVTVSA

SEQ ID NO: 341 - protein, 107 aa, Artificial Sequence
  Synthetic: Clone M9 variable LC
EIVLTQSPTTMAASPGEKITITCSASSSVSSNYLHWYQQKPGFSPKLLIYRTSNLPSGVPARFFGSGSGTSYSLTIGTMEAEDVATYYCQQGSGMLTFGAGTKLELK

SEQ ID NO: 342 - protein, 117 aa, Artificial Sequence
  Synthetic: Caninized Clone M3 variable HC v1
EVQLVESGGDLVKPAGSLRLSCTVSGFSLSRYSVHWVRQAPGKGLEWLGMIWGGGSTDYNSVVKGRFTISRDNAKNTVYLQMNSLRAEDTAMYYCARTYRGYALDYWGQGTLVTVSS

SEQ ID NO: 343 - protein, 117 aa, Artificial Sequence
  Synthetic: Caninized Clone M3 variable HC v2
ELTLQESGPGLVKPSQTLSLTCTVSGFSLSRYSVHWIRQPRGRGLELLGMIWGGGSTDYNPAFQGRISITADTAKNQFSLQLSSMTTEDTAVYYCARTYRGYALDYWGQGTLVTVSS

SEQ ID NO: 344 - protein, 107 aa, Artificial Sequence
  Synthetic: Caninized Clone M3 variable LC v1
DIVMTQTPLSLSVSPGEPASISCRASQDISNYLNWYLQKAGQSPRLLIYYTSRLQSGVPDRFSGSGSGTDFTLRIGRVEAEDAGIYFCQQANTLPLTFGQGTRLEVR

SEQ ID NO: 345 - protein, 120 aa, Artificial Sequence
  Synthetic: Caninized Clone M9 variable HC v1
EVQLVESGGDLVKPGGSLRLSCAASGFTFSSFGMHWVRQAPGKGLEWVAYIRSDSSTIYYADAVKGRFTISRDNAKNTLYLQMNSLRAEDTAMYYCARSGYYGSFSLTYWGQGTLVTVSS

SEQ ID NO: 346 - protein, 120 aa, Artificial Sequence
  Synthetic: Caninized Clone M9 variable HC v2
EVQLVESGGDLVKPGGSLRLSCVASGFTFSSFGMHWVRQAPGKGLQWVAYIRSDSSTIYYADAVKGRFTISRDNAKNTLYLQMNSLRAEDTAMYYCARSGYYGSFSLTYWGQGTLVTVSS

SEQ ID NO: 347 - protein, 107 aa, Artificial Sequence
  Synthetic: Caninized Clone M9 variable LC v1
DIMLTQTPLSLSVSPGEPASISCSASSSVSSNYLHWYLQKAGQSPRLLIYRTSNLPSGVPDRFSGSGSGTDFTLRIGRVEAEDAGIYYCQQGSGMLTFGQGTRLEVR

SEQ ID NO: 348 - protein, 452 aa, Artificial Sequence
  Synthetic: Caninized Clone M3 variable HC v1 and  variant canine IgG-B  C1q , CD16
EVQLVESGGDLVKPAGSLRLSCTVSGFSLSRYSVHWVRQAPGKGLEWLGMIWGGGSTDYNSVVKGRFTISRDNAKNTVYLQMNSLRAEDTAMYYCARTYRGYALDYWGQGTLVTVSSASTTAPSVFPLAPSCGSTSGSTVALACLVSGYFPEPVTVSWNSGSLTSGVHTFPSVLQSSGLYSLSSMVTVPSSRWPSETFTCNVAHPASKTKVDKPVPKRENGRVPRPPDCPKCPAPEPLGGPSVFIFPPKPKDTLLIARTPEVTCVVVDLDREDPEVQISWFVDGKQMQTAKTQPREEQFNGTYRVVSVLPIGHQDWLKGKQFTCRVNNKALPSPIERTISKARGQAHQPSVYVLPPSREELSKNTVSLTCLIKDFFPPDIDVEWQSNGQQEPESKYRTTPPQLDEDGSYFLYSKLSVDKSRWQRGDTFICAVMHEALHNHYTQESLSHSPGK

SEQ ID NO: 349 - protein, 452 aa, Artificial Sequence
  Synthetic: Caninized Clone M3 variable HC v2 and  variant canine IgG-B  C1q , CD16
ELTLQESGPGLVKPSQTLSLTCTVSGFSLSRYSVHWIRQPRGRGLELLGMIWGGGSTDYNPAFQGRISITADTAKNQFSLQLSSMTTEDTAVYYCARTYRGYALDYWGQGTLVTVSSASTTAPSVFPLAPSCGSTSGSTVALACLVSGYFPEPVTVSWNSGSLTSGVHTFPSVLQSSGLYSLSSMVTVPSSRWPSETFTCNVAHPASKTKVDKPVPKRENGRVPRPPDCPKCPAPEPLGGPSVFIFPPKPKDTLLIARTPEVTCVVVDLDREDPEVQISWFVDGKQMQTAKTQPREEQFNGTYRVVSVLPIGHQDWLKGKQFTCRVNNKALPSPIERTISKARGQAHQPSVYVLPPSREELSKNTVSLTCLIKDFFPPDIDVEWQSNGQQEPESKYRTTPPQLDEDGSYFLYSKLSVDKSRWQRGDTFICAVMHEALHNHYTQESLSHSPGK

SEQ ID NO: 350 - protein, 217 aa, Artificial Sequence
  Synthetic: Caninized Clone M3 variable LC v1 and canine ? light constant region
DIVMTQTPLSLSVSPGEPASISCRASQDISNYLNWYLQKAGQSPRLLIYYTSRLQSGVPDRFSGSGSGTDFTLRIGRVEAEDAGIYFCQQANTLPLTFGQGTRLEVRRNDAQPAVYLFQPSPDQLHTGSASVVCLLNSFYPKDINVKWKVDGVIQDTGIQESVTEQDKDSTYSLSSTLTMSSTEYLSHELYSCEITHKSLPSTLIKSFQRSECQRVD

SEQ ID NO: 351 - protein, 455 aa, Artificial Sequence
  Synthetic: Caninized Clone M9 variable HC v1 and  variant canine IgG-B  C1q , CD16
EVQLVESGGDLVKPGGSLRLSCAASGFTFSSFGMHWVRQAPGKGLEWVAYIRSDSSTIYYADAVKGRFTISRDNAKNTLYLQMNSLRAEDTAMYYCARSGYYGSFSLTYWGQGTLVTVSSASTTAPSVFPLAPSCGSTSGSTVALACLVSGYFPEPVTVSWNSGSLTSGVHTFPSVLQSSGLYSLSSMVTVPSSRWPSETFTCNVAHPASKTKVDKPVPKRENGRVPRPPDCPKCPAPEPLGGPSVFIFPPKPKDTLLIARTPEVTCVVVDLDREDPEVQISWFVDGKQMQTAKTQPREEQFNGTYRVVSVLPIGHQDWLKGKQFTCRVNNKALPSPIERTISKARGQAHQPSVYVLPPSREELSKNTVSLTCLIKDFFPPDIDVEWQSNGQQEPESKYRTTPPQLDEDGSYFLYSKLSVDKSRWQRGDTFICAVMHEALHNHYTQESLSHSPGK

SEQ ID NO: 352 - protein, 455 aa, Artificial Sequence
  Synthetic: Caninized Clone M9 variable HC v2 and  variant canine IgG-B  C1q , CD16
EVQLVESGGDLVKPGGSLRLSCVASGFTFSSFGMHWVRQAPGKGLQWVAYIRSDSSTIYYADAVKGRFTISRDNAKNTLYLQMNSLRAEDTAMYYCARSGYYGSFSLTYWGQGTLVTVSSASTTAPSVFPLAPSCGSTSGSTVALACLVSGYFPEPVTVSWNSGSLTSGVHTFPSVLQSSGLYSLSSMVTVPSSRWPSETFTCNVAHPASKTKVDKPVPKRENGRVPRPPDCPKCPAPEPLGGPSVFIFPPKPKDTLLIARTPEVTCVVVDLDREDPEVQISWFVDGKQMQTAKTQPREEQFNGTYRVVSVLPIGHQDWLKGKQFTCRVNNKALPSPIERTISKARGQAHQPSVYVLPPSREELSKNTVSLTCLIKDFFPPDIDVEWQSNGQQEPESKYRTTPPQLDEDGSYFLYSKLSVDKSRWQRGDTFICAVMHEALHNHYTQESLSHSPGK

SEQ ID NO: 353 - protein, 217 aa, Artificial Sequence
  Synthetic: Caninized Clone M9 variable LC v1 and canine ? light constant region
DIMLTQTPLSLSVSPGEPASISCSASSSVSSNYLHWYLQKAGQSPRLLIYRTSNLPSGVPDRFSGSGSGTDFTLRIGRVEAEDAGIYYCQQGSGMLTFGQGTRLEVRRNDAQPAVYLFQPSPDQLHTGSASVVCLLNSFYPKDINVKWKVDGVIQDTGIQESVTEQDKDSTYSLSSTLTMSSTEYLSHELYSCEITHKSLPSTLIKSFQRSECQRVD

SEQ ID NO: 354 - protein, 14 aa, Artificial Sequence
  Synthetic: M3 canine IL4R epitope
DFMGSENHTCVPEN

SEQ ID NO: 355 - protein, 33 aa, Artificial Sequence
  Synthetic: M8 canine IL4R   epitope 1
GSVKVLHEPSCFSDYISTSVCQWKMDHPTNCSA

SEQ ID NO: 356 - protein, 12 aa, Artificial Sequence
  Synthetic: M8 canine IL4R   epitope 2
REDSVCVCSMPI

SEQ ID NO: 357 - protein, 20 aa, Artificial Sequence
  Synthetic: M9 canine IL4R epitope
REDSVCVCSMPIDDAVEADV
